(19) United States
(12) Patent Application Publication
(10) Pub. No.: US 2024/0299468 A1
(43) Pub. Date: Sep. 12, 2024

(54) COMPOSITIONS AND METHODS FOR TREATMENT OF SKIN DISORDERS

(71) Applicant: Weiss Bioscience, Inc., San Francisco, CA (US)

(72) Inventors: Emma TAYLOR, San Francisco, CA (US); David HANZEL, Palo Alto, CA (US)

(21) Appl. No.: 18/479,701

(22) Filed: Oct. 2, 2023

Related U.S. Application Data
(63) Continuation of application No. 17/530,114, filed on Nov. 18, 2021, now abandoned.
Application No. 17/530,114 is a continuation of application No. 16/275,155, filed on Feb. 13, 2019, now Pat. No. 11,207,357.
Application No. 16/275,155 is a continuation of application No. 15/723,022, filed on Oct. 2, 2017, now Pat. No. 10,293,007.
Application No. 15/723,022 is a continuation of application No. 15/493,971, filed on Apr. 21, 2017, now Pat. No. 9,889,165.
(60) Provisional application No. 62/441,931, filed on Jan. 3, 2017.
(60) Provisional application No. 62/385,831, filed on Sep. 9, 2016.
(60) Provisional application No. 62/368,829, filed on Jul. 29, 2016.
(60) Provisional application No. 62/368,837, filed on Jul. 29, 2016.
(60) Provisional application No. 62/325,851, filed on Apr. 21, 2016.

(51) Int. Cl. A61K 35/741

(52) U.S. Cl. CPC A61K 35/741

(57) ABSTRACT

Described herein are compositions and methods of treatment for acne and other skin disorders involving the use of probiotics. In certain aspects, microbes included in the probiotics have been engineered or selected for the treatment of specific skin disorders.

### CROSS-REFERENCE TO RELATED APPLICATIONS

[0001] This application is a continuation of U.S. patent application Ser. No. 17/530,114, filed Nov. 18, 2021, which is a continuation of U.S. patent application Ser. No. 16/275,155, filed Feb. 13, 2019, now U.S. Pat. No. 11,207,357, issued Dec. 28, 2021, which is a continuation of U.S. patent application Ser. No. 15/723,022, filed Oct. 2, 2017, now U.S. Pat. No. 10,293,007, issued May 21, 2019, which is a continuation of U.S. patent application Ser. No. 15/493,971, filed Apr. 21, 2017, now U.S. Pat. No. 9,889,165, issued Feb. 13, 2018, which claims the benefit of U.S. Provisional Application No. 62/325,851, filed Apr. 21, 2016, U.S. Provisional Application No. 62/368,837, filed Jul. 29, 2016, U.S. Provisional Application No. 62/368,829, filed Jul. 29, 2016, U.S. Provisional Application No. 62/385,831, filed Sep. 9, 2016, and U.S. Provisional Application No. 62/441,931, filed Jan. 3, 2017, each of which is incorporated herein by reference in its entirety for all purposes.

### SEQUENCE LISTING

[0002] The instant application contains a Sequence Listing which has been filed electronically in XML format and is hereby incorporated by reference in its entirety. Said XML copy, created on Oct. 2, 2023, is named 63115_701_304_SL.xml and is 2,090,476 bytes in size.

### BACKGROUND OF THE INVENTION

[0003] The community of microorganisms living on and/or within an individual is the microbiome. The microbiome consists of many different bacterial species some of which are beneficial, neutral or deleterious to human health. Alterations in the microbiome have been connected to many disease states such as inflammatory diseases, metabolic disease, developmental diseases, psychological diseases and cancer. Determining the composition of the microbiome, and altering the microbiome from a pathological to healthy state holds great therapeutic promise for many different diseases.

### SUMMARY

[0004] Provided herein are microbiome-based approaches to skin therapy using beneficial bacteria on the skin to eliminate or reduce harmful bacteria and restore skin to a healthy state. The methods and compositions disclosed herein may be used for a wide range of skin disorders including acne, eczema, psoriasis, rosacea and seborrheic dermatitis. Problems with current treatments for these disorders include antibiotic resistance, side effects, complicated regimens, and lack of long-term effectiveness. Treatments disclosed herein may provide alternatives to antibiotics, use healthy bacteria, present few side effects, with simple treatment regimens and long-term effectiveness.

[0005] Compositions described herein generally contain at least one health-associated microbe or probiotic that conveys beneficial effects to a subject with a skin disorder. Thus, the compositions disclosed herein are effective on the skin (e.g., at skin temperature). These compositions sometimes contain a mixture of several strains that have each been isolated, purified, selected or engineered to provide a specific cocktail of bacteria that does not occur in nature. These strains can be stored or packaged with a preservative agent, such as glycerol or polyethylene glycol in a container or on an applicator such as a cotton swab, as shown in FIG. 1. These containers and applicators can be stored in a freezer, refrigerator or on a shelf at room temperature, both before and during use.

[0006] Many of the compositions and methods disclosed herein comprise bacteria known as Propionibacterium acnes, abbreviated P. acnes, and uses thereof, respectively. However, other bacteria, including genetically modified strains, and uses thereof are also contemplated herein. Some strains of P. acnes used in compositions and methods disclosed herein are referred to herein as healthy strains of P. acnes or, for simplicity, “healthy P. acnes.” Healthy strains of P. acnes generally promote skin health by preventing a skin disorder or reducing symptoms of a skin disorder. Healthy strains of P. acnes may even promote skin health by eliminating the cause of a skin disorder. Other strains of P. acnes are referred to herein as pathogenic strains or “pathogenic P. acnes.” Pathogenic P. acnes generally promote or cause a skin disorder or symptoms thereof. Generally, pathogenic P. acnes are not used in compositions and methods described herein. Instead, methods and compositions disclosed herein may be useful in reducing or preventing growth of pathogenic P. acnes on the skin of a subject. In some cases, an amount of P. acnes can be considered healthy or pathogenic, too much or too little being desirable or undesirable. In some cases, a combination of multiple P. acnes strains confers health. Conversely, in some cases, a different combination of multiple P. acnes strains can be pathogenic. Strains of P. acnes, combinations thereof, and amounts thereof that are healthy and pathogenic are described herein.

[0007] Compositions and methods disclosed herein may comprise bacteria with a given genetic signature and uses thereof, respectively. While P. acnes is the bacteria primarily exemplified herein, it is contemplated that other bacteria having a particular genetic signature that is similar to healthy P. acnes could likewise be useful for compositions and methods disclosed herein. For example, many P. acnes strains that are identified as healthy herein comprise a combination of a deoxyribose operon repressor (deoR), a type II lipase, and a CRISPR associated Cas endonuclease. Additionally, healthy P. acnes strains are generally associated with an absence or only small amounts of an extrachromosomal plasmid known in the art as pIMPLE plasmids. It has previously been reported that some strains of P. acnes harbor an extrachromosomal plasmid, given the term, “pIMPLE plasmid,” by those in the field. Such plasmids are readily found in the art. pIMPLE plasmids may have multiple open reading frames (ORFs). The presence of these aforementioned genes (e.g., deoR, lipase, Cas) and/or a low presence of pIMPLE plasmid may provide a healthy skin promoting genetic signature that can be used to identify bacteria other than P. acnes that are useful in compositions and methods of treating acnes described herein.

[0008] In some aspects, disclosed herein are pharmaceutical compositions that comprise: a first therapeutically effective amount of a first health-associated Propionibacterium microbe, wherein the first health-associated Propionibacterium microbe produces less than about one micromolar porphyrin; a second therapeutically effective amount of a second health-associated microbe; and a pharmaceutically acceptable excipient or biological stabilizer. In some embodiments, the second health-associated microbe comprises a strain of Propionibacterium. In some embodiments, the second health-associated microbe produces less than about one micromolar porphyrin. In some embodiments, the first health-associated Propionibacterium microbe and the second health-associated Propionibacterium microbe collectively produce less than about one micromolar porphyrin. In some embodiments, at least one of the first health-associated Propionibacterium microbe and the second health-associated Propionibacterium microbe produce less than about 200 nM porphyrin. In some embodiments, at least one of the first health-associated Propionibacterium microbe and the second health-associated Propionibacterium microbe produce less than about 100 nM porphyrin. In some embodiments, the first health-associated Propionibacterium microbe and the second health-associated Propionibacterium microbe collectively produce less than about 100 nM porphyrin. In some embodiments, at least one of the first health-associated Propionibacterium microbe and the second health-associated Propionibacterium microbe produce less than about one micromolar porphyrin in situ. In some embodiments, at least one of the first health-associated Propionibacterium microbe and the second health-associated Propionibacterium microbe produce less than about one micromolar porphyrin in vitro. In some embodiments, at least the first health-associated Propionibacterium microbe comprises a strain of Propionibacterium acnes, Propionibacterium granulosum, Propionibacterium avidum, or Propionibacterium acnes sub sp. defendens. In some embodiments, at least the first health-associated Propionibacterium microbe comprises a strain of Propionibacterium acnes. In some embodiments, at least the first health-associated Propionibacterium microbe comprises a Propionibacterium acnes of a ribotype RT1 or RT2. In some embodiments, at least the first health-associated Propionibacterium microbe: (a) comprises at least one gene encoding an ATP binding cassette transporter; (b) comprises at least one gene encoding at least one of a deoxyribose operon repressor and a type II lipase, and less than about 10% pIMPLE plasmid; or (c) lacks at least one gene encoding a DNA binding response regulator or a phosphoglycerate kinase.

[0009] In some aspects, disclosed herein are pharmaceutical compositions that comprise: (a) a therapeutically effective amount of a health-associated Propionibacterium acnes microbe, wherein the health-associated Propionibacterium acnes microbe is characterized by at least one of the following: comprises at least one gene encoding at least one of a deoxyribose operon repressor and a type II lipase, and less than about 10% pIMPLE plasmid; comprises at least one gene encoding an ATP binding cassette transporter; or lacks at least one gene encoding a DNA binding response regulator or a phosphoglycerate kinase, and (b) a pharmaceutically acceptable excipient or biological stabilizer. In some embodiments, the health-associated Propionibacterium acnes microbe has been engineered or selected to comprise a deoxyribose operon repressor and a type II lipase. In some embodiments, a Cas5 protein is absent from the health-associated Propionibacterium acnes microbe. In some embodiments, the health-associated Propionibacterium acnes microbe expresses an ATP binding cassette transporter. In some embodiments, the health-associated Propionibacterium acnes microbe does not express a DNA binding response regulator or a phosphoglycerate kinase. In some embodiments, the health-associated Propionibacterium acnes microbe comprises an RT1 or RT2 ribotype. In some embodiments, the health-associated Propionibacterium acnes microbe does not comprise an RT6 ribotype. In some embodiments, the health-associated Propionibacterium acnes microbe comprises a mixture of two or more different ribotypes of Propionibacterium acnes. In some embodiments, the health-associated Propionibacterium acnes microbe comprises an HP3A11 strain, an HP3B4 strain, an HP4G1 strain, or an HP5G4 strain. In some embodiments, the pharmaceutical probiotic composition comprises an additional strain of bacteria, wherein the additional strain comprises Propionibacterium avidum or Propionibacterium granulosum. In some embodiments, the additional strain comprises Propionibacterium acnes subsp. defendens.

[0010] In some aspects, disclosed herein are methods of treating a skin disorder or condition comprising applying a therapeutically effective amount of a pharmaceutical probiotic composition comprising: (a) a therapeutically effective amount of a health-associated Propionibacterium acnes microbe, wherein the health-associated Propionibacterium acnes microbe is characterized by at least one of the following: comprises at least one gene encoding at least one of a deoxyribose operon repressor and a type II lipase, and less than about 10% pIMPLE plasmid; comprises at least one gene encoding an ATP binding cassette transporter; or lacks at least one gene encoding a DNA binding response regulator or a phosphoglycerate kinase, and (b) a pharmaceutically acceptable excipient or biological stabilizer. In some embodiments, the skin disorder or condition comprises acne, eczema, seborrheic dermatitis, psoriasis, or rosacea, or a combination thereof. In some embodiments, the health-associated Propionibacterium acnes microbe has been engineered or selected to at least one gene encoding the deoxyribose operon repressor and the type II lipase. In some embodiments, a Cas5 protein is absent from the health-associated Propionibacterium acnes microbe. In some embodiments, the health-associated Propionibacterium acnes microbe comprises an RT1 or RT2 ribotype. In some embodiments, the health-associated Propionibacterium acnes microbe does not comprise an RT6 ribotype. In some embodiments, the health-associated Propionibacterium acnes microbe comprises a mixture of two or more different ribotypes. In some embodiments, the health-associated Propionibacterium acnes microbe comprises an HP3A11 strain, an HP3B4 strain, an HP4G1 strain, or an HP5G4 strain. In some embodiments, the pharmaceutical probiotic composition comprises an additional strain of bacteria, wherein the additional strain comprises Propionibacterium avidum or Propionibacterium granulosum. In some embodiments, the additional strain comprises Propionibacterium acnes subsp. defendens.

[0011] In some aspects, disclosed herein are pharmaceutical probiotic compositions that comprise: (a) a first therapeutically effective amount of a health-associated Propionibacterium acnes microbe, wherein the first health-associated Propionibacterium acnes microbe is characterized by at least one of the following: comprises at least one gene encoding at least one of a deoxyribose operon repressor and a type II lipase, and less than about 10% pIMPLE plasmid; comprises at least one gene encoding an ATP binding cassette transporter; or lacks at least one gene encoding a DNA binding response regulator or a phosphoglycerate kinase; (b) a second therapeutically effective amount of a second health-associated microbe, wherein the second health-associated microbe has been engineered or selected to comprise at least one gene encoding at least one of a deoxyribose operon repressor and a type II lipase, and less than about 10% pIMPLE plasmid; and (c) a pharmaceutically acceptable excipient or biological stabilizer. In some embodiments, the second health-associated microbe is a strain of bacteria comprising P. acnes, P. granulosum, or P. avidum. In some embodiments, the second health-associated microbe is a strain of bacteria comprising Propionibacterium acnes subsp. defendens.

[0012] In some aspects, disclosed herein are pharmaceutical compositions that comprise: (a) a pharmaceutically acceptable excipient or biological stabilizer; and (b) a therapeutically effective amount of a health-associated Propionibacterium acnes microbe, wherein the health-associated Propionibacterium acnes microbe does not express a DNA binding response regulator, a phosphoglycerate kinase, or a combination thereof. In some aspects, disclosed herein are pharmaceutical compositions that comprise: (a) a pharmaceutically acceptable excipient or biological stabilizer; and (b) a therapeutically effective amount of a health-associated Propionibacterium acnes microbe, wherein the health-associated Propionibacterium acnes microbe expresses an ATP-binding cassette transporter. In some aspects, disclosed herein are pharmaceutical compositions that comprise: (a) a pharmaceutically acceptable excipient or biological stabilizer; and (b) a therapeutically effective amount of a health-associated Propionibacterium acnes microbe, wherein the health-associated Propionibacterium acnes microbe: does not express a DNA binding response regulator, a phosphoglycerate kinase, or a combination thereof, and expresses an ATP-binding cassette transporter. In some embodiments, the DNA binding response regulator is encoded by a sequence of SEQ ID NO: 7. In some embodiments, the DNA binding response regulator is encoded by a sequence that is at least 50% homologous to a sequence of SEQ ID NO: 7. In some embodiments, the phosphoglycerate kinase is encoded by a sequence of SEQ ID NO: 9. In some embodiments, the phosphoglycerate kinase is encoded by a sequence that is at least 50% homologous to a sequence of SEQ ID NO: 9. In some embodiments, the ATP-binding cassette transporter is encoded by a sequence of SEQ ID NO: 6. In some embodiments, the ATP-binding cassette transporter is encoded by a sequence that is at least 50% homologous to a sequence of SEQ ID NO: 6. In some embodiments, the pharmaceutical composition comprises at least two strains of bacteria. In some embodiments, the pharmaceutical composition comprises a strain of Propionibacterium acnes having a ribotype of RT1, RT2, RT3, RT4 or RT5. In some embodiments, the pharmaceutical composition comprises a strain of Propionibacterium acnes having a ribotype of RT1 or RT2. In some embodiments, the health-associated Propionibacterium acnes microbe does not comprise an RT6 ribotype. In some embodiments, the pharmaceutical composition is formulated for topical administration. In some embodiments, the pharmaceutical composition is in the form of a gel, ointment, lotion, emulsion, paste, cream, foam, mousse, liquid, spray, suspension, dispersion and aerosol. In some embodiments, the pharmaceutical composition comprises a liposome or nanoparticle. In some embodiments, the health-associated Propionibacterium acnes microbe comprises a deoxyribose operon repressor and a type II lipase. In some embodiments, a Cas5 protein is absent from the health-associated Propionibacterium acnes microbe. In some embodiments, the health-associated Propionibacterium acnes microbe comprises less than about 1% pIMPLE plasmid. In some embodiments, the health-associated Propionibacterium acnes microbe comprises less than about 0.3% pIMPLE plasmid. In some embodiments, the health-associated Propionibacterium acnes microbe comprises a mixture of two or more different ribotypes of Propionibacterium acnes. In some embodiments, the pharmaceutically acceptable excipient or biological stabilizer increases the viability of the health-associated Propionibacterium acnes microbe at a temperature from about −10° C. to about 30° C. In some embodiments, the pharmaceutical composition comprises an additional strain of bacteria. In some embodiments, the pharmaceutical composition comprises an additional strain of bacteria, wherein the additional strain comprises Propionibacterium avidum and Propionibacterium granulosum. In some embodiments, the additional strain comprises Propionibacterium acnes subsp. defendens. In some embodiments, the health-associated Propionibacterium acnes microbe is selected, transformed or engineered to: (a) comprise at least one gene encoding at least one of a deoxyribose operon repressor and a type II lipase, and less than about 10% pIMPLE plasmid; (b) comprise at least one gene encoding an ATP binding cassette transporter; or (c) lack at least one gene encoding a DNA binding response regulator or a phosphoglycerate kinase.

[0013] In some aspects, methods of treating a skin disorder or condition are provided comprising applying a therapeutically effective amount of a pharmaceutical composition disclosed herein. In some embodiments, the skin disorder or condition comprises acne, eczema, seborrheic dermatitis, psoriasis, or rosacea, or a combination thereof.

[0014] In some aspects, disclosed herein are pharmaceutical probiotic compositions comprising: (a) a therapeutically effective amount of a health-associated Propionibacterium acnes microbe, wherein the health-associated Propionibacterium acnes microbe has been engineered or selected to comprise at least one gene encoding at least one of a deoxyribose operon repressor and a type II lipase, and less than about 10% pIMPLE plasmid; and (b) a pharmaceutically acceptable excipient or biological stabilizer. In some embodiments, the health-associated Propionibacterium acnes microbe has been engineered or selected to comprise a deoxyribose operon repressor and a type II lipase. In some embodiments, a Cas 5 protein is absent from the health-associated Propionibacterium acnes microbe. In some embodiments, the health-associated Propionibacterium acnes microbe comprises an RT1 or RT2 ribotype. In some embodiments, the health-associated Propionibacterium acnes microbe does not comprise an RT6 ribotype. In some embodiments, the health-associated Propionibacterium acnes microbe comprises less than about 1% pIMPLE plasmid. In some embodiments, the health-associated Propionibacterium acnes microbe comprises less than about 0.3% pIMPLE plasmid. In some embodiments, the health-associated Propionibacterium acnes microbe comprises a mixture of two or more different ribotypes of Propionibacterium acnes. In some embodiments, the pharmaceutically acceptable excipient or biological stabilizer increases the viability of the health-associated Propionibacterium acnes microbe at a temperature from about −10° C. to about 30° C. In some embodiments, the health-associated Propionibacterium acnes microbe comprises an HP3A11 strain, an HP3B4 strain, an HP4G1, or an HP5G4 strain. In some embodiments, the pharmaceutical probiotic composition comprises an additional strain of bacteria, wherein the additional strain comprises Propionibacterium avidum or Propionibacterium granulosum. In some embodiments, the additional strain comprises Propionibacterium acnes subsp. defendens. In some embodiments, the health-associated Propionibacterium acnes microbe expresses an ATP binding cassette transporter. In some embodiments, the health-associated Propionibacterium acnes microbe does not express a DNA binding response regulator or a phosphoglycerate kinase.

[0015] In some aspects, disclosed herein are methods of treating a skin disorder or condition comprising applying a therapeutically effective amount of a pharmaceutical probiotic composition comprising: (a) a therapeutically effective amount of a health-associated Propionibacterium acnes microbe, wherein the health-associated Propionibacterium acnes microbe has been engineered or selected to comprise at least one gene encoding at least one of a deoxyribose operon repressor and a type II lipase, and less than about 10% pIMPLE plasmid; and (b) a pharmaceutically acceptable excipient or biological stabilizer. In some embodiments, the skin disorder or condition comprises acne, eczema, seborrheic dermatitis, psoriasis, or rosacea. In some embodiments, the health-associated Propionibacterium acnes microbe has been engineered or selected to at least one gene encoding the deoxyribose operon repressor and the type II lipase. In some embodiments, the Cas5 protein is absent from the health-associated Propionibacterium acnes microbe. In some embodiments, the health-associated Propionibacterium acnes microbe comprises an RT1 or RT2 ribotype. In some embodiments, the health-associated Propionibacterium acnes microbe does not comprise an RT6 ribotype. In some embodiments, the health-associated Propionibacterium acnes microbe comprises less than about 1% pIMPLE plasmid. In some embodiments, the health-associated Propionibacterium acnes microbe comprises less than about 0.3% pIMPLE plasmid. In some embodiments, the health-associated Propionibacterium acnes microbe comprises a mixture of two or more different ribotypes. In some embodiments, the pharmaceutically acceptable excipient or biological stabilizer increases the viability of the health-associated Propionibacterium acnes microbe at a temperature from about −10° C. to about 30° C. In some embodiments, the health-associated Propionibacterium acnes microbe comprises at least one of an HP3A11 strain, an HP3B4 strain, or HP4G1 strain, or an HP5G4 strain. In some embodiments, the pharmaceutical probiotic composition comprises an additional strain of bacteria, wherein the additional strain comprises Propionibacterium avidum or Propionibacterium granulosum. In some embodiments, the additional strain comprises Propionibacterium acnes subsp. defendens.

[0016] In some aspects, disclosed herein are pharmaceutical probiotic compositions comprising: (a) a first therapeutically effective amount of a first health-associated Propionibacterium acnes microbe, wherein the first health-associated Propionibacterium acnes microbe has been engineered or selected to at least one gene encoding at least one of a deoxyribose operon repressor and a type II lipase, and less than about 10% pIMPLE plasmid; (b) a second therapeutically effective amount of a second health-associated Propionibacterium acnes microbe, wherein the second health-associated Propionibacterium acnes microbe has been engineered or selected to comprise at least one gene encoding at least one of a deoxyribose operon repressor and a type II lipase, and less than about 10% pIMPLE plasmid; and (c) a pharmaceutically acceptable excipient or biological stabilizer. In some embodiments, the first or the second health-associated Propionibacterium acnes microbe has been engineered or selected to comprise: (i) at least one gene encoding the deoxyribose operon repressor and the type II lipase, (ii) at least one gene encoding the deoxyribose operon repressor and less than about 10% pIMPLE plasmid, or (iii) at least one gene encoding the type II lipase and less than about 10% pIMPLE plasmid. In some embodiments, the first and the second health-associated Propionibacterium acnes microbe has been engineered or selected to comprise: (i) at least one gene encoding the deoxyribose operon repressor and the type II lipase, (ii) at least one gene encoding the deoxyribose operon repressor and less than about 10% pIMPLE plasmid, or (iii) at least one gene encoding the type II lipase and less than about 10% pIMPLE plasmid. In some embodiments, the first or the second health-associated Propionibacterium acnes microbe has been engineered or selected to comprise at least one gene encoding the deoxyribose operon repressor, the type II lipase, and less than about 10% pIMPLE plasmid. In some embodiments, the first and the second health-associated Propionibacterium acnes microbe has been engineered or selected to comprise at least one gene encoding the deoxyribose operon repressor, the type II lipase, and less than about 10% pIMPLE plasmid. In some embodiments, the first and the second health-associated Propionibacterium acnes microbes are different strains. In some embodiments, the first or the second health-associated Propionibacterium acnes microbe comprises an RT1 or RT2 ribotype. In some embodiments, the first health-associated Propionibacterium acnes microbe comprises an RT1 ribotype and the second health-associated Propionibacterium acnes microbe comprises an RT2 ribotype. In some embodiments, neither the first nor the second health-associated Propionibacterium acnes microbe comprises an RT6 ribotype. In some embodiments, the pharmaceutically acceptable excipient or biological stabilizer increases the viability of the health-associated. Propionibacterium acnes microbe at a temperature from about −10° C. to about −30° C. In some embodiments, the health-associated Propionibacterium acnes microbe comprises at least one of an HP3A11 strain, an HP3B4 strain, or HP4G1 strain, or an HP5G4 strain. In some embodiments, the first or second health-associated Propionibacterium acnes microbe expresses an ATP binding cassette transporter. In some embodiments, the first or second health-associated Propionibacterium acnes microbe does not express a DNA binding response regulator or a phosphoglycerate kinase. In some aspects, the pharmaceutical probiotic compositions disclosed herein are for use in the treatment of a skin disorder or condition.

[0017] In some aspects, disclosed herein are methods of producing a desired preparation of a Propionibacterium acnes bacteria, said method comprising: (a) adding a sample of the Propionibacterium acnes bacteria to a glycerol solution to produce a Propionibacterium acnes glycerol stock, and (b) storing the Propionibacterium acnes glycerol stock at a temperature of about 4° C. or less, wherein more than about 50% of the P. acnes bacteria is viable when the Propionibacterium acnes bacteria in the glycerol solution is brought to ambient temperature. In some embodiments, the glycerol solution is between about 25% and about 75% glycerol. In some embodiments, the glycerol solution is about 50% glycerol. In some embodiments, the temperature is between about 4° C. and about −80° C. In some embodiments, the temperature is about −20° C. In some embodiments, at least about 70% to at least about 90% of the sample is viable after the Propionibacterium acnes glycerol stock is brought to ambient temperature. In some embodiments, at least about 90% of the sample is viable after the Propionibacterium acnes glycerol stock is brought to ambient temperature. In some embodiments, the ambient temperature is between about 20° C. and about 30° C. In some embodiments, the ambient temperature is about 25° C. In some embodiments, the Propionibacterium acnes glycerol stock is brought to ambient temperature before about 90 days of initiating storing. In some embodiments, more than 50% of the sample is viable after about 20 days of storing. In some embodiments, more than about 50% of the sample is viable after about 90 days of storing. In some embodiments, more than about 50% of the sample is viable at least up to about 90 days of storing. In some embodiments, the Propionibacterium acnes bacteria comprises an HP3A11 strain, an HP3B4 strain, or HP4G1 strain, or an HP5G4 strain.

[0018] In some aspects, disclosed herein are methods of producing a desired preparation of a preserved Propionibacterium acnes sample, wherein at least about 90% of said preserved Propionibacterium acnes sample is viable after sixty days of storage, said method comprising: (a) adding a sample of Propionibacterium acnes bacteria to a solution of between about 25% and about 50% glycerol in phosphate buffered saline solution to produce a Propionibacterium acnes glycerol stock; and (b) cooling the Propionibacterium acnes glycerol stock at a temperature from about −20° C. to about 4° C., thereby forming said desired preparation wherein at least about 90% of said sample of Propionibacterium acnes bacteria is viable after sixty days of storage. In some aspects, disclosed herein are methods of producing a desired preparation of a preserved Propionibacterium acnes sample, wherein at least about 90% of said preserved Propionibacterium acnes sample is viable after ninety days of storage, said method comprising: adding a sample of Propionibacterium acnes bacteria to a solution of about 50% glycerol to produce a Propionibacterium acnes glycerol stock; and freezing the Propionibacterium acnes glycerol stock at −20° C., thereby forming said desired preparation wherein at least about 90% of said sample of Propionibacterium acnes bacteria is viable after a thawing of the Propionibacterium acnes glycerol stock. In some embodiments, the methods comprise thawing the Propionibacterium acnes glycerol stock at room temperature. In some embodiments, the solution is about 25-50% glycerol v/v in water. In some embodiments, the solution is about 25-50% glycerol v/v in a buffered solution. In some embodiments, the buffered solution is a phosphate buffered saline. In some embodiments, the buffered solution is an acetate buffered solution. In some embodiments, the solution comprises potassium. In some embodiments, the solution comprises potassium at a concentration of about 150 mM to about 200 mM. In some embodiments, the solution comprises calcium. In some embodiments, the solution comprises calcium at a concentration of about 0.05 mM to about 0.1 mM. In some embodiments, the solution comprises a prebiotic stabilizing agent. In some embodiments, the prebiotic stabilizing agent is inulin. In some embodiments, the inulin is present in the solution at a concentration of about 0.05% v/v to about 0.2% v/v. In some embodiments, the solution comprises an anti-acne agent. In some embodiments, the anti-acne agent comprises a retinoid, a vitamin, an antioxidant, a peroxide, an acid, an oil, an alcohol, an extract, or an analog thereof. In some embodiments, the retinoid comprises tretinoin, tazarotene, adapalene, or retinol. In some embodiments, the vitamin or analog thereof comprises Vitamin D, Vitamin C, Vitamin E, or calciptotriene. In some embodiments, the antioxidant comprises Vitamin C or Vitamin E. In some embodiments, the peroxide is benzoyl peroxide. In some embodiments, the acid comprises salicylic acid, azaelic acid, trichloracetic acid, or glycolic acid. In some embodiments, the alcohol comprises retinol or resveratrol. In some embodiments, the oil is tea tree oil. In some embodiments, the extract is a green tea extract. In some embodiments, the solution is incorporated in a biologic stability platform to eliminate cold chain storage. In some embodiments, the biologic storage platform comprises foam drying or foam formation of the solution or glycerol stock solution. In some embodiments, the solution comprises at least one of a glyconanoparticle, a liposome, a nanoparticle, trehalose, sucrose, stachyose, hydroxyethyl starch, or a combination of glycine and mannitol. In some embodiments, the sample of Propionibacterium acnes bacteria comprises Propionibacterium acnes bacteria of ribotype RT1. In some embodiments, the sample of Propionibacterium acnes bacteria comprises Propionibacterium acnes bacteria of ribotype RT2. In some embodiments, the sample of Propionibacterium acnes bacteria comprises Propionibacterium acnes bacteria of ribotype RT1 and RT2. In some embodiments, the Propionibacterium acnes bacteria is characterized by at least one of the following: comprises a deoR protein; comprises a type II lipase; comprises less than 10% pIMPLE plasmid; does not comprise a Cas5 protein; comprises an ATP binding cassette transporter protein; does not comprise a DNA binding response regulator; and does not comprise a phosphoglycerate kinase. In some embodiments, the sample of Propionibacterium acnes bacteria comprises Propionibacterium acnes an HP3A11 strain, an HP3B4 strain, or HP4G1 strain, or an HP5G4 strain.

### BRIEF DESCRIPTION OF THE DRAWINGS

[0019] FIG. 1 illustrates exemplary production and packaging of compositions of health-associated microbes disclosed herein. Dashed lines indicate optional steps.

[0020] FIG. 2 shows the percentage of reads from a sample of a healthy volunteer (free of acne) that map to P. acnes to ribotype RT1, which are both deoR+ and type II lipase positive, versus the percentage of reads from the samples that map to P. acnes RT2.

[0021] FIG. 3 shows results of an assay for P. acnes viability under different preservation conditions.

[0022] FIG. 4 shows a portion of a 23S, ribosomal RNA sequence from bacteria commonly found on the human face that enables characterization of a subject's skin microbiome. Numbers listed to the left of sequences correspond to bacterial strains as follows: (1) P. acnes_KPA171202_RT1_2; (2) P. acnes_KPA171202_RT1_3; (3) P. acnes ATCC 11828_RT2_1; (4) P. acnes ATCC 11828_RT2_2; (5) P. avidum 44067; (6) P. acidipropionici ATCC 4875; (7) S. aureus 04-02981; (8) S. aureus Bmb9393; (9) S. aureus FDA209P; (10) S. epidermidis ATCC 12228; and (11) S. epidermidis PM221. Sequences 1-5 correspond to SEQ ID NOs: 33 to 37. Sequence 6 corresponds to SEQ ID NO: 38. Sequences 7-11 correspond to SEQ ID NOs: 39-43.

[0023] FIG. 5 shows a standard curve generated with serial dilutions of a combination of health-associated P. acnes and S. epidermidis that can be used to quantitate a percentage of health-associated P. acnes in a collected sample.

[0024] FIG. 6 shows qPCR of successful CRISPR editing in P. acnes.

[0025] FIG. 7 shows mutations in a gene encoding a P. acnes type I lipase that result in a gene encoding a P. acnes type II lipase. Type I lipase Intergenic Region corresponds to SEQ ID NO.: 44. Type I lipase Second Lipase (region) (HMPREF0675_4856) corresponds to SEQ ID NOS: 45, 46 and 47, respectively, in order of appearance. Type II lipase Second Lipase (region) (HMPREF0675_4856) corresponds to SEQ ID NOS: 50, 55 and 56, respectively, in order of appearance. Type I lipase Intergenic Region corresponds to SEQ ID NO.: 44. Type II lipase Intergenic Region corresponds to SEQ ID NO.: 49. SEQ ID NO: 57 is disclosed as the sequence extending from the Type I lipase Intergenic Region through the next 12 residues in the Type I lipase Second Lipase (region). SEQ ID NO: 58 is disclosed as the sequence extending from the Type II lipase Intergenic Region through the next 12 residues in the Type II lipase Second Lipase (region).

[0026] FIG. 8 shows exemplary packaging for compositions disclosed herein.

[0027] FIG. 9 shows bacteria viability of composition disclosed herein after being packaged under several conditions.

### DETAILED DESCRIPTION OF THE INVENTION

[0028] In the following description, certain specific details are set forth in order to provide a thorough understanding of various embodiments. However, one skilled in the art will understand that the embodiments provided may be practiced without these details. Unless the context requires otherwise, throughout the specification and claims which follow, the word “comprise” and variations thereof, such as, “comprises” and “comprising” are to be construed in an open, inclusive sense, that is, as “including, but not limited to.” As used in this specification and the appended claims, the singular forms “a,” “an,” and “the” include plural referents unless the content clearly dictates otherwise. It should also be noted that the term “or” is generally employed in its sense including “and/or” unless the content clearly dictates otherwise. Further, headings provided herein are for convenience only and do not interpret the scope or meaning of the claimed embodiments.

[0029] As used herein the term “about” refers to an amount that is near the stated amount by about 10%, 5%, or 1%.

[0030] As used herein “consisting essentially of” when used to define compositions and methods, shall mean excluding other elements of any essential significance to the combination for the stated purpose. Thus, a composition consisting essentially of the elements as defined herein would not exclude other materials or steps that do not materially affect the basic and novel characteristic(s) of the claimed disclosure, such as compositions for treating skin disorders like acne, eczema, psoriasis, and rosacea.

[0031] As used herein “health-associated” means a microbe that is more prevalent in healthy or disease free individuals than in individuals diagnosed with a given disorder. In certain embodiments, the disease may be acne, eczema, seborrheic dermatitis, psoriasis, rosacea, or any combination thereof. A health-associated microbe can be determined statistically. For example, by comparing the microbiome or the prevalence of certain microbial species or strains on the skin, in the oral cavity, or in the digestive system of a healthy non-disease afflicted individual as compared to an individual with a given disease. Genera, species, or strains that are more prevalent in/on healthy individuals are health-associated. A health-associated strain can also be a strain that has been genetically modified or selected to express low levels of virulence factors that are associated with a given skin disease. A health-associated strain can also be a strain that has been genetically modified or selected to express high levels of beneficial genes, RNAs, or proteins that are associated with protection from a given skin disease. A health-associated strain can also be a strain that has been genetically modified or selected to express, not express, or express desirable levels of markers, as described herein.

[0032] As used herein a “probiotic” is a microbe that provides health benefits when consumed or applied. In some instances, probiotics disclosed herein are microbes that inhibit the activity or growth of a disease causing bacteria associated with acne, eczema, seborrheic dermatitis, psoriasis, or rosacea.

[0033] As used herein, the terms “homologous,” “homology,” or “percent homology” when used herein to describe to an amino acid sequence or a nucleic acid sequence, relative to a reference sequence, can be determined using the formula described by Karlin and Altschul (Proc. Natl. Acad. Sci. USA 87: 2264-2268, 1990, modified as in Proc. Natl. Acad. Sci. USA 90:5873-5877, 1993). Such a formula is incorporated into the basic local alignment search tool (BLAST) programs of Altschul et al. (J. Mol. Biol. 215: 403-410, 1990). Percent homology of sequences can be determined using the most recent version of BLAST, as of the filing date of this application.

[0034] Strains of Propionibacterium acnes, HP3A11, HP4G1 and HP5G4, described herein, were deposited in the American Tissue Culture Collection (10801 University Boulevard Manassas, VA 20110-2209 USA) on Apr. 6, 2017 in accordance with and under the provisions of the Budapest Treaty for the International Recognition of the Deposit of Microorganisms for the Purpose of Patent Procedure. The strains were tested by the ATCC and determined to be viable. The ATCC has assigned ATCC deposit accession numbers: PTA-124010 to strain HP3A11; PTA-124011 to strain HP4G1; and PTA 124012 to HP5G4.

[0035] Provided throughout this application are compositions and methods for the treatment of skin disorders. It is should be understood that compositions disclosed herein may be used according to methods described herein. Conversely, methods disclosed herein may appropriately employ compositions disclosed herein.

### Compositions for Treatments of Skin Disorders

[0036] In some aspects, the disclosure provides compositions comprising a strain of bacteria. The strain of bacteria is generally a strain that promotes, restores or improves skin health. In some embodiments, compositions disclosed herein comprise at least one health-associated strain of bacteria. In some embodiments, the at least one health-associated strain of bacteria is a strain of Propionibacterium bacteria. In some embodiments, the at least one health-associated strain of bacteria is a strain of Staphylococcus bacteria. In some embodiments, the at least one health-associated strain of bacteria is a strain of Lactobacillus bacteria. In some embodiments, the composition is formulated for application to the skin of a subject.

[0037] In some embodiments, compositions disclosed herein comprise a fungus. The fungus is generally a fungus that promotes, restores or improves skin health. In some embodiments, compositions disclosed herein comprise at least one health-associated fungus. In some embodiments, the fungus is Malassezia.

[0038] In some embodiments, compositions disclosed herein comprise a bacteriophage, also referred to herein as a phage for simplicity. In some embodiments, the bacteriophage is a Propionibacterium phage. In some embodiments, the bacteriophage is a health-associated Propionibacterium phage. In some embodiments, the health-associated Propionibacterium phage is a phage found on skin of a subject that is free of a skin disorder. In some embodiments, the health-associated Propionibacterium phage is a phage found on skin of a subject that is free of acne. In some embodiments, the health-associated Propionibacterium phage is a phage found on skin of a subject that is free of eczema. In some embodiments, the health-associated Propionibacterium phage is a phage found on skin of a subject that is free of psoriasis. In some embodiments, the health-associated Propionibacterium phage is a phage found on skin of a subject that is free of seborrheic dermatitis. In some embodiments, the health-associated Propionibacterium phage is a phage found on skin of a subject that is free of rosacea. In some embodiments, the health-associated Propionibacterium phage is a phage that is more abundant or prevalent on skin free of a skin disorder than skin with a skin disorder. In some embodiments, the bacteriophage is a Propionibacterium acnes phage. In some embodiments, the Propionibacterium acnes phage targets a select strain of P. acnes. In some embodiments, the Propionibacterium acnes phage targets a pathogenic strain of P. acnes. Non-limiting examples of Propionibacterium acnes phages are described in Farrar et al. (2007) J. Bacteriol., vol. 189, pp. 4161-4167, and Liu et al. (2015) ISME J, vol. 9, pp. 2078-2093.

[0039] In some embodiments, the at least one health-associated strain of bacteria is a strain of Propionibacterium acnes (referred to herein as P. acnes). In some embodiments, the at least one health-associated strain of bacteria is not a strain of P. acnes subsp. acnes. In some embodiments, the at least one health-associated strain of bacteria is a strain of Propionibacterium avidum (referred to herein as P. avidum). In some embodiments, the at least one health-associated strain of bacteria is a strain of Propionibacterium granulosum (referred to herein as P. granulosum). In some embodiments, the at least one health-associated strain of bacteria is a strain of Propionibacterium acnes subsp. defendens (referred to herein as P. acnes subsp. defendens). In some embodiments, the at least one health-associated strain of bacteria is a strain of Staphylococcus aureus. In some embodiments, the at least one health-associated strain of bacteria is a strain of Staphylococcus epidermidis. In some embodiments, the at least one health-associated strain of bacteria is a strain of Staphylococcus hominis. In some embodiments, the at least one health-associated strain of bacteria is a strain of Lactobacillus reuteri. In some embodiments, the strain of bacteria is associated with healthy skin or normal skin, and is referred to as a probiotic (or live biologic therapeutic). In some embodiments, the probiotic is associated with skin that is free of acne. In some embodiments, the probiotic is associated with skin that is essentially free of acne.

[0040] Provided herein are compositions that comprise at least one probiotic disclosed herein. In some embodiments, a probiotic disclosed herein is selected or assessed for a composition for treatment by assessing an amount of inflammation that is caused by the probiotic to the skin of a subject. In some embodiments, the probiotic produces or induces a low amount of pro-inflammatory mediators when applied to a subject's skin. In some embodiments, the probiotic produces or induces a low amount of pro-inflammatory mediators when applied to a subject's skin. In some embodiments, the probiotic does not produce or induce pro-inflammatory mediators when applied to a subject's skin. In some embodiments, the probiotic does not produce or induce pro-inflammatory mediators when applied to a subject's skin. In some embodiments, the probiotic does not produce or induce an amount of pro-inflammatory mediators sufficient to cause acne of a subject when applied to a subject's skin. In some embodiments, the probiotic does not produce or induce an amount of pro-inflammatory mediators sufficient to worsen acne of a subject when applied to a subject's skin. The probiotic may not induce human inflammatory associated mRNAs such as interleukins, chemokine or cytokines when applied to a subject's skin. The probiotic may induce only low amounts of human inflammatory associated mRNAs such as interleukins, chemokine or cytokines, when applied to a subject's skin.

[0041] In some embodiments, a probiotic disclosed herein is selected or assessed by incubating a sample of keratinocytes with the probiotic. In some embodiments, the probiotic produces or induces a low amount of pro-inflammatory mediators when co-incubated with a subject's keratinocytes. In some embodiments, the probiotic produces or induces a low amount of pro-inflammatory mediators when co-incubated with skin keratinocytes that are pooled from multiple subjects. In some embodiments, the probiotic does not produce or induce pro-inflammatory mediators when co-incubated with a subject's keratinocytes. In some embodiments, the probiotic does not produce or induce pro-inflammatory mediators when co-incubated with skin keratinocytes pooled from multiple subjects (e.g., “pooled skin keratinocytes”). In some embodiments, the probiotic comprises does not produce or induce an amount of pro-inflammatory mediators sufficient to cause acne of a subject when co-incubated with the subject's keratinocytes or pooled skin keratinocytes. In some embodiments, the probiotic does not produce or induce an amount of pro-inflammatory mediators sufficient to worsen acne of a subject when co-incubated with a subject's keratinocytes or pooled skin keratinocytes. The probiotic may not induce human inflammatory associated mRNAs such as interleukins, chemokine or cytokines when incubated with a subjects own keratinocytes or pooled keratinocytes from a plurality of healthy volunteers. The probiotic may induce only low amounts of human inflammatory associated mRNAs such as interleukins, chemokine or cytokines, when incubated with a subjects own keratinocytes or pooled keratinocytes from a plurality of healthy volunteers. The probiotic may induce only low amounts of human inflammatory associated mRNAs or proteins such as interleukins, chemokine or cytokines, when incubated with primary human monocytes. In a certain embodiment, the inflammatory interleukin, chemokine or cytokine comprises IL-2, IL-12, or MCP-1. An exemplar assay for induction of IL-12 in monocytes by a bacterium can be found in U.S. Pat. No. 9,549,905.

[0042] Compositions disclosed herein may comprise a strain the produces low levels of at least one porphyrin. In some embodiments, the strain produces undetectable levels of the at least one porphyrin. Non-limiting examples of porphyrins include coproporphyrin III and protoporphyrin IX. In some embodiments, a low level of the at least one porphyrin is less than about 1 micromolar. In some embodiments, a low level of the at least one porphyrin is less than about 750 nanomolar. In some embodiments, a low level of the at least one porphyrin is less than about 500 nanomolar. In some embodiments, a low level of the at least one porphyrin is less than about 250 nanomolar. In some embodiments, a low level of the at least one porphyrin is less than about 200 nanomolar. In some embodiments, a low level of the at least one porphyrin is less than about 150 nanomolar. In some embodiments, a low level of the at least one porphyrin is less than about 100 nanomolar. In some embodiments, a low level of the at least one porphyrin is less than about 50 nanomolar. In some embodiments, a low level of the at least one porphyrin is less than about 10 nanomolar. In some embodiments, a low level of the at least one porphyrin is less than about 1 nanomolar. In some embodiments, the low level is a level measured in vitro. In some embodiments, the low level is a level measured in situ, due to fluorescent properties of porphyrins. In some embodiments, a strain is genetically modified to delete or mutate a nucleic acid encoding an enzyme in a porphyrin production pathway to effectively create or select for strains with low porphyrin production. In some embodiments, the strain has low lipase activity as compared to a pathogenic strain of bacteria. In some embodiments, the strain has low immunogenicity as compared to a pathogenic strain of bacteria.

[0043] Disclosed herein are pharmaceutical compositions that comprise: (a) a first therapeutically effective amount of a first health-associated Propionibacterium microbe, wherein the first health-associated Propionibacterium microbe produces less than about one micromolar porphyrin; (b) a second therapeutically effective amount of a second health-associated microbe; and (c) a pharmaceutically acceptable excipient or biological stabilizer. Further disclosed herein are pharmaceutical compositions that consist essentially of: (a) a first therapeutically effective amount of a first health-associated Propionibacterium microbe, wherein the first health-associated Propionibacterium microbe produces less than about one micromolar porphyrin; (b) a second therapeutically effective amount of a second health-associated microbe; (c) a pharmaceutically acceptable excipient or biological stabilizer; and (d) optionally, an additional active ingredient disclosed herein. In some embodiments, the second health-associated microbe comprises a strain of Propionibacterium. In some embodiments, the concentration of porphyrin is a concentration measured in vitro. In some embodiments, the concentration of porphyrin is a concentration measured in situ. For example, porphyrin concentration can be measured directly on skin of a subject using light of a wavelength around 400 nm, a camera that detects fluorescence, and digital imaging software that quantifies fluorescence. In some embodiments, light of a wavelength between 300 and 900 nm is used.

[0044] In some embodiments, the first health-associated microbe produces less than about one micromolar porphyrin

[0045] In some embodiments, the second health-associated microbe produces less than about one micromolar porphyrin.

[0046] In some embodiments, the first health-associated Propionibacterium microbe and the second health-associated Propionibacterium microbe collectively produce less than about one micromolar porphyrin. In some embodiments, the first health-associated Propionibacterium microbe and the second health-associated Propionibacterium microbe collectively produce less than about 800 nanomolar porphyrin. In some embodiments, the first health-associated Propionibacterium microbe and the second health-associated Propionibacterium microbe collectively produce less than about 500 nanomolar porphyrin. In some embodiments, the first health-associated Propionibacterium microbe and the second health-associated Propionibacterium microbe collectively produce less than about 200 nanomolar porphyrin. In some embodiments, the first health-associated Propionibacterium microbe and the second health-associated Propionibacterium microbe collectively produce less than about 100 nM porphyrin. In some embodiments, the first health-associated Propionibacterium microbe and the second health-associated Propionibacterium microbe collectively produce less than about 10 nM porphyrin.

[0047] In some embodiments, the first health-associated Propionibacterium microbe comprises a strain of Propionibacterium acnes, Propionibacterium granulosum, Propionibacterium avidum, or Propionibacterium acnes subsp. defendens. In some embodiments, the second health-associated Propionibacterium microbe comprises a strain of Propionibacterium acnes, Propionibacterium granulosum, Propionibacterium avidum, or Propionibacterium acnes sub sp. defendens. In some embodiments, the first health-associated Propionibacterium microbe comprises a strain of Propionibacterium acnes. In some embodiments, the second health-associated Propionibacterium microbe comprises a strain of Propionibacterium acnes. In some embodiments, the first health-associated Propionibacterium microbe comprises a Propionibacterium acnes of a ribotype RT1 or RT2. In some embodiments, the second health-associated Propionibacterium microbe comprises a Propionibacterium acnes of a ribotype RT1 or RT2. In some embodiments, the first health-associated Propionibacterium microbe: (a) comprises at least one gene encoding an ATP binding cassette transporter; (b) comprises at least one gene encoding at least one of a deoxyribose operon repressor and a type II lipase, and less than about 10% pIMPLE plasmid; or (c) lacks at least one gene encoding a DNA binding response regulator or a phosphoglycerate kinase. In some embodiments, the second health-associated Propionibacterium microbe: (a) comprises at least one gene encoding an ATP binding cassette transporter; (b) comprises at least one gene encoding at least one of a deoxyribose operon repressor and a type II lipase, and less than about 10% pIMPLE plasmid; or (c) lacks at least one gene encoding a DNA binding response regulator or a phosphoglycerate kinase.

[0048] Probiotic strains disclosed herein may be defined by 16S, 18S, or 23S ribosomal DNA sequences, metagenomic DNA, the presence of specific health-associated markers, the absence of disease associated markers, or a combination thereof. Probiotic strains disclosed herein may be enriched or isolated to obtain a purified strain.

[0049] Provided herein are compositions comprising not more than one isolated strain of bacteria disclosed herein. Provided herein are compositions comprising not more than two isolated strains of bacteria disclosed herein. Provided herein are compositions comprising not more than three isolated strains of bacteria disclosed herein. Provided herein are compositions comprising not more than four isolated strains of bacteria disclosed herein. Provided herein are compositions comprising not more than five isolated strains of bacteria disclosed herein. Provided herein are compositions comprising not more than six isolated strains of bacteria disclosed herein. Provided herein are compositions comprising not more than seven isolated strains of bacteria disclosed herein. Provided herein are compositions comprising not more than eight isolated strains of bacteria disclosed herein. Provided herein are compositions comprising not more than nine isolated strains of bacteria disclosed herein. Provided herein are compositions comprising not more than ten isolated strains of bacteria disclosed herein.

[0050] Probiotics disclosed herein may comprise at least one strain of bacteria that inhibits the activity of a pathogenic strain of P. acnes. In some embodiments, the probiotic is bacteriostatic or bactericidal for a pathogenic strain of P. acnes. In some embodiments, the probiotic reduces growth, re-growth or metabolism of the pathogenic strain of P. acnes. In certain embodiments, the probiotic reduces growth (or re-growth) of the pathogenic P. acnes by at least about 20% as compared to placebo/no probiotic. In certain embodiments, the probiotic reduces growth (or re-growth) of the pathogenic P. acnes by at least about 30%. In certain embodiments, the probiotic reduces growth (or re-growth) of the pathogenic P. acnes by at least about 40%. In certain embodiments, the probiotic reduces growth (or re-growth) of the pathogenic P. acnes by at least about 50%. In certain embodiments, the probiotic reduces growth (or re-growth) of the pathogenic P. acnes by at least about 60%. In certain embodiments, the probiotic reduces growth (or re-growth) of the pathogenic P. acnes by at least about 70%. In certain embodiments, the probiotic reduces growth (or re-growth) of the pathogenic P. acnes by at least about 2-fold. In certain embodiments, the probiotic reduces growth (or re-growth) of the pathogenic P. acnes by at least about 3-fold. In certain embodiments, the probiotic reduces growth (or re-growth) of the pathogenic P. acnes by at least about 5-fold. In certain embodiments, the probiotic reduces growth (or re-growth) of the pathogenic P. acnes by at least about 10-fold. Inhibition or reduction of growth (or re-growth) of the pathogenic P. acnes may be assessed in an in vitro assay, either in liquid culture or on solid media.

[0051] In some embodiments, the probiotic comprises at least one healthy P. acnes strain. In some embodiments, the probiotic comprises not more than one healthy P. acnes strain. In some embodiments, the probiotic comprises at least two healthy P. acnes strains. In some embodiments, the at least one healthy P. acnes strain is not a strain of P. acnes subsp. acnes. In some embodiments, the probiotic comprises at least one healthy P. avidum strain. In some embodiments, the probiotic comprises not more than one healthy P. avidum strain. In some embodiments, the probiotic comprises at least two healthy P. avidum strains. In some embodiments, the probiotic comprises at least one healthy P. granulosum strain. In some embodiments, the probiotic comprises not more than one healthy P. granulosum strain. In some embodiments, the probiotic comprises at least two healthy P. granulosum strains. In some embodiments, the probiotic comprises at least one healthy P. acnes subsp. defendens strain. In some embodiments, the probiotic comprises not more than one healthy P. acnes subsp. defendens strain. In some embodiments, the probiotic comprises at least two healthy P. acnes subsp. defendens strains.

[0052] P. acnes strains may be characterized by a ribotype (RT). Ribotypes are defined, for example, as in Fitz-Gibbon et al., J. Investigative Dermatology 133:2152-60 (2013). A ribotype can be determined by the nucleic acid sequence of the strain's 16S ribosomal subunit. In certain embodiments, the probiotic comprises healthy P. acnes of a ribotype selected from at least one of the following ribotypes of RT1, RT2, RT3, RT4, RT5, RT7, RT8, RT9, or RT10. In certain embodiments, the probiotic comprises healthy P. acnes of a ribotype selected from at least one of the following ribotypes of RT1, RT2, RT3, RT7, RT8, RT9, or RT10. In certain embodiments, the probiotic comprises healthy P. acnes of a ribotype selected from RT1 and RT2. In some instances, the probiotic does not comprise a P. acnes strain of ribotype RT6. In some instances, the probiotic does not comprise a P. acnes strain of a ribotype selected from RT3, RT4, RT5 and RT6. In some instances, the probiotic does not comprise a P. acnes strain of ribotype RT6. In some instances, the probiotic does not comprise a P. acnes strain of a ribotype selected from RT3, RT4, and RT5. In some embodiments, compositions disclosed herein comprise a strain of P. acnes of ribotype RT1. In some embodiments, compositions disclosed herein comprise a strain of P. acnes of ribotype RT2. In some embodiments, compositions disclosed herein comprise a strain of P. acnes of ribotype RT3. In some embodiments, compositions disclosed herein comprise a strain of P. acnes of ribotype RT4. In some embodiments, compositions disclosed herein comprise a strain of P. acnes of ribotype RT5. In some embodiments, compositions disclosed herein comprise a strain of P. acnes of ribotype RT6. In some embodiments, compositions disclosed herein comprise a strain of P. acnes of ribotype RT7. In some embodiments, compositions disclosed herein comprise a strain of P. acnes of ribotype RT8. In some embodiments, compositions disclosed herein comprise a strain of P. acnes of ribotype RT9. In some embodiments, compositions disclosed herein comprise a strain of P. acnes of ribotype RT10. In certain embodiments, the probiotic comprises a strain of P. acnes of a ribotype selected from at least one of RT1, RT2, and RT3. In certain embodiments, the probiotic comprises a P. acnes strain of ribotype RT1. In certain embodiments, the probiotic comprises a P. acnes strain of ribotype RT2. In certain embodiments, the probiotic comprises a P. acnes strain of ribotype RT3. In certain embodiments, the probiotic comprises a P. acnes strain of ribotype RT3. In certain embodiments, the probiotic does not comprise an RT6 ribotype.

[0053] In certain embodiments, the probiotic does not comprise a strain with a nucleic acid having a sequence that is 95%, 97%, 98%, 99% or 100% homologous to a sequence selected from SEQ ID NO: 51, SEQ ID NO: 52, SEQ ID NO: 53, and SEQ ID NO: 54. In certain embodiments, the probiotic does not comprise a strain with a nucleic acid having a sequence that is more than 50% homologous to a sequence selected from SEQ ID NO: 51, SEQ ID NO: 52, SEQ ID NO: 53, and SEQ ID NO: 54. In certain embodiments, the probiotic does not comprise a strain with a nucleic acid having a sequence selected from SEQ ID NO: 51, SEQ ID NO: 52, SEQ ID NO: 53.

[0054] In certain embodiments, probiotics disclosed herein comprise a plurality of microbes of different ribotypes. In certain embodiments, the plurality of microbes is a mixture of two or more P. acnes strains of different ribotypes. In certain embodiments, the probiotic comprises a first strain of P. acnes of ribotype RT1 and a second strain of P. acnes of ribotype RT2. In certain embodiments, the probiotic comprises a first strain of P. acnes of ribotype RT1 and a second strain of P. acnes of ribotype RT3. In certain embodiments, the probiotic comprises a first strain of P. acnes of ribotype RT1 and a second strain of P. acnes is not ribotype RT6. In certain embodiments, the probiotic comprises a first strain of P. acnes of ribotype RT2 and a second strain of P. acnes of ribotype RT3. In certain embodiments, the probiotic comprises a first strain of P. acnes of ribotype RT2 and a second strain of P. acnes is not ribotype RT6. In certain embodiments, the probiotic comprises a first strain of P. acnes of ribotype RT2 and a second strain of P. acnes of ribotype RT3. In certain embodiments, the probiotic consists essentially of a first strain of P. acnes of ribotype RT1 and a second strain of P. acnes of ribotype RT2. In certain embodiments, the probiotic consists essentially of a first strain of P. acnes of ribotype RT1 and a second strain of P. acnes of ribotype RT3. In certain embodiments, the probiotic consists essentially of a first strain of P. acnes of ribotype RT1 and a second strain of P. acnes is not ribotype RT6. In certain embodiments, the probiotic consists essentially of a first strain of P. acnes of ribotype RT2 and a second strain of P. acnes of ribotype RT3. In certain embodiments, the probiotic consists essentially of a first strain of P. acnes of ribotype RT2 and a second strain of P. acnes is not ribotype RT6. In certain embodiments, the probiotic consists essentially of a first strain of P. acnes of ribotype RT2 and a second strain of P. acnes of ribotype RT3. In some embodiments, the first strain of P. acnes and the second strain of P. acnes are provided separately. In some embodiments, the first strain of P. acnes and second strain of P. acnes are mixed.

[0055] In some embodiments, probiotics disclosed herein comprise a health-associated P. acnes strain that is ribotype RT1, deoR-positive, type II lipase-positive, does not comprise Cas5, and has less than 5% pIMPLE plasmid. In some embodiments, deoR-positive means that the strain comprises a nucleic acid encoding deoR. In some embodiments, deoR-positive means that the strain comprises a deoR protein. In some embodiments, type II lipase-positive means that the strain comprises a nucleic acid encoding type II lipase. In some embodiments, type II lipase-positive means that the strain comprises a type II lipase protein. In some embodiments, the strain does not comprise a nucleic acid encoding a Cas 5 protein. In some embodiments, probiotics disclosed herein comprise a health-associated P. acnes strain that is ribotype RT2, deoR-positive, type II lipase-positive, Cas5-positive and has less than 5% pIMPLE plasmid.

[0056] In certain embodiments, the probiotic is a plurality of microbes of different ribotypes. In certain embodiments, the plurality of microbes comprises a mixture of three or more P. acnes strains of different ribotypes. In certain embodiments, the different ribotypes are RT1, RT2, and RT3. In certain embodiments, the different ribotypes are RT2, RT3, and not RT6. In certain embodiments, the different ribotypes are RT1, RT2, and not RT6. In certain embodiments, the different ribotypes are RT1, RT3, and not RT6. In certain embodiments, the mixture consists essentially of three P. acnes strains, wherein the three P. acnes strains are of ribotypes RT1, RT2, and RT3. In certain embodiments, the mixture consists essentially of three P. acnes strains, wherein the three P. acnes strains are of ribotypes RT2, RT3, and not RT6. In certain embodiments, the mixture consists essentially of three P. acnes strains, wherein the three P. acnes strains are of ribotypes RT1, RT2, and not RT6. In certain embodiments, the mixture consists essentially of three P. acnes strains, wherein the three P. acnes strains are of ribotypes RT1, RT3, and not RT6.

[0057] In some embodiments, probiotics disclosed herein comprise at least one health-associated strain of P. acnes, wherein the health-associated strain of P. acnes has a ribotype of RT1 or RT2. In some embodiments, probiotics disclosed herein comprise at least two health-associated strains of P. acnes, wherein a first health-associated strain of P. acnes has a ribotype of RT1 and a second health-associated strain of P. acnes has a ribotype of RT2. In some embodiments, probiotics disclosed herein do not comprise a strain of P. acnes, other than a health-associated strain of P. acnes disclosed herein that has a ribotype selected from RT1 and RT2. In some embodiments, the probiotic does not comprise a strain of P. acnes that has a ribotype RT6. In some embodiments, the probiotic does not comprise a strain of P. acnes that comprises a nucleic acid encoding a DNA binding response regulator or a phosphoglycerate kinase, as described herein. In some embodiments, the probiotic comprises a strain of P. acnes comprising a nucleic acid encoding an ATP binding cassette transporter, as described herein. In some embodiments, the probiotic does not comprise a strain of P. acnes that expresses DNA binding response regulator or phosphoglycerate kinase, as described herein. In some embodiments, the probiotic comprises a strain of P. acnes that expresses an ATP binding cassette transporter, as described herein.

[0058] In some embodiments, probiotics disclosed herein comprise at least one strain of bacteria that can be identified by a genetic signature. The genetic signature can be described as one or more genes that are at least present, and optionally expressed, in a strain of bacteria. The one or more genes may comprise a gene encoding a deoxyribose operon repressor (deoR). The one or more genes may encode a type I lipase. The one or more genes may encode a type II lipase. The one or more genes may encode Cas 5. In some instances, the one or more genes do not comprise a gene encoding a deoxyribose operon repressor (gene abbreviated deoR, protein abbreviated herein as deoR). In some instances, the one or more genes do not comprise a gene encoding a type I lipase. In some instances, the one or more genes do not comprise a gene encoding a type II lipase. In some instances, the one or more genes do not comprise a gene encoding a Cas5 protein.

[0059] In some embodiments, probiotics disclosed herein comprise at least one strain of bacteria expressing a type II lipase. In some embodiments, probiotics disclosed herein comprise at least one strain of bacteria expressing a deoR and a type II lipase. In some embodiments, probiotics disclosed herein comprise at least one strain of bacteria expressing a Cas5 and a type II lipase. In some embodiments, probiotics disclosed herein comprise at least one strain of bacteria expressing a deoR and a type II lipase and a Cas5.

[0060] In some embodiments, compositions disclosed herein comprise at least one strain of bacteria, wherein less than about 25% of a number of reads align per number of reads tested when the reads from sequencing the strain are aligned to a pIMPLE plasmid. In some embodiments, compositions disclosed herein comprise at least one strain of bacteria, wherein less than about 20% of a number of reads align per number of reads tested when the reads from sequencing the strain are aligned to a pIMPLE plasmid. In some embodiments, compositions disclosed herein comprise at least one strain of bacteria, wherein less than about 15% of a number of reads align per number of reads tested when the reads from sequencing the strain are aligned to a pIMPLE plasmid. In some embodiments, compositions disclosed herein comprise at least one strain of bacteria, wherein less than about 10% of a number of reads align per number of reads tested when the reads from sequencing the strain are aligned to a pIMPLE plasmid. In some embodiments, compositions disclosed herein comprise at least one strain of bacteria, wherein less than about 9% of a number of reads align per number of reads tested when the reads from sequencing the strain are aligned to a pIMPLE plasmid. In some embodiments, compositions disclosed herein comprise at least one strain of bacteria, wherein less than about 8% of a number of reads align per number of reads tested when the reads from sequencing the strain are aligned to a pIMPLE plasmid. In some embodiments, compositions disclosed herein comprise at least one strain of bacteria, wherein less than about 7% of a number of reads align per number of reads tested when the reads from sequencing the strain are aligned to a pIMPLE plasmid. In some embodiments, compositions disclosed herein comprise at least one strain of bacteria, wherein less than about 6% of a number of reads align per number of reads tested when the reads from sequencing the strain are aligned to a pIMPLE plasmid. In some embodiments, compositions disclosed herein comprise at least one strain of bacteria, wherein less than about 5% of a number of reads align per number of reads tested when the reads from sequencing the strain are aligned to a pIMPLE plasmid. In some embodiments, compositions disclosed herein comprise at least one strain of bacteria, wherein less than about 4% of a number of reads align per number of reads tested when the reads from sequencing the strain are aligned to a pIMPLE plasmid. In some embodiments, compositions disclosed herein comprise at least one strain of bacteria, wherein less than about 3% of a number of reads align per number of reads tested when the reads from sequencing the strain are aligned to a pIMPLE plasmid. In some embodiments, compositions disclosed herein comprise at least one strain of bacteria, wherein less than about 2% of a number of reads align per number of reads tested when the reads from sequencing the strain are aligned to a pIMPLE plasmid. In some embodiments, compositions disclosed herein comprise at least one strain of bacteria, wherein less than about 1% of a number of reads align per number of reads tested when the reads from sequencing the strain are aligned to a pIMPLE plasmid. In some embodiments, compositions disclosed herein comprise at least one strain of bacteria, wherein less than about 0.5% of a number of reads align per number of reads tested when the reads from sequencing the strain are aligned to a pIMPLE plasmid.

[0061] In some embodiments, the composition comprises a strain of bacteria that is ribotype RT1, expresses type I lipase, and does not express deoR and Cas5, and wherein less than 5% of a number of reads align to pIMPLE plasmid per number of reads tested from whole genome sequencing of the strain. In some embodiments, the composition comprises a strain of bacteria that is ribotype RT1, expresses deoR and type I lipase, and does not express Cas5, and wherein less than 5% of a number of reads align to pIMPLE plasmid per number of reads tested from whole genome sequencing of the strain. In some embodiments, the composition comprises a strain of bacteria that is ribotype RT1, expresses deoR and type II lipase, and does not express Cas5, and wherein less than 5% of a number of reads align to pIMPLE plasmid per number of reads tested from whole genome sequencing of the strain. In some embodiments, the composition comprises a strain of bacteria that is ribotype RT2, expresses deoR, type II lipase, and Cas5, and wherein less than 5% of a number of reads align to pIMPLE plasmid per number of reads tested from whole genome sequencing of the strain. In some embodiments, the composition comprises a strain of bacteria that is ribotype RT4 and expresses type I lipase, but not deoR. In some embodiments, the composition comprises a strain of bacteria that is not ribotype RT6, expresses deoR, type II lipase, and Cas5, and wherein less than 5% of a number of reads align to pIMPLE plasmid per number of reads tested from whole genome sequencing of the strain.

[0062] In some embodiments, the composition comprises a strain of bacteria that is ribotype RT1, comprises a nucleic acid encoding type I lipase, and does not comprises a nucleic acid encoding deoR or Cas5, and wherein less than 5% of a number of reads align to pIMPLE plasmid per number of reads tested from whole genome sequencing of the strain. In some embodiments, the composition comprises a strain of bacteria that is ribotype RT1, comprises at least one nucleic acid encoding deoR and type I lipase, does not comprise a nucleic acid encoding Cas5, and wherein less than 5% of a number of reads align to pIMPLE plasmid per number of reads tested from whole genome sequencing of the strain. In some embodiments, the composition comprises a strain of bacteria that is ribotype RT1, a nucleic acid encoding deoR and type II lipase, does not comprise a nucleic acid encoding Cas5, and wherein less than 5% of a number of reads align to pIMPLE plasmid per number of reads tested from whole genome sequencing of the strain. In some embodiments, the composition comprises a strain of bacteria that is ribotype RT2, comprises at least one nucleic acid encoding deoR, type II lipase, and Cas5, and wherein less than 5% of a number of reads align to pIMPLE plasmid per number of reads tested from whole genome sequencing of the strain. In some embodiments, the composition comprises a strain of bacteria that is ribotype RT4 and comprises a nucleic acid encoding type I lipase, but does not comprise a nucleic acid encoding deoR. In some embodiments, the composition comprises a strain of bacteria that is not ribotype RT6, comprises at least one nucleic acid encoding deoR, type II lipase, and Cas5, and wherein less than 5% of a number of reads align to pIMPLE plasmid per number of reads tested from whole genome sequencing of the strain.

[0063] Table 1 below provides a summary of non-limiting examples of P. acnes bacteria, or populations of bacteria comprising P. acnes bacteria, that can be distinguished by analysis of different genetic markers. The + symbol indicates the presence of deoR or Cas5 (or nucleic acids encoding deoR or Cas5) in the columns labeled deoR and Cas5, respectively. The − symbol indicates absence of deoR or Cas5 (or nucleic acids encoding deoR or Cas5) in the columns labeled deoR and Cas5, respectively. 0% pIMPLE plasmid refers to the number of reads aligned/number of reads tested when bacteria is sequenced for pIMPLE plasmid.

TABLE 1
Sequences of P. acnes genetic elements.

| | | | | | % pIMPLE | ABC | | | Exemplary |
|---|---|---|---|---|---|---|---|---|---|
| Group | RT | deoR | Lipase | Cas5 | plasmid | XP | DBRR | PGK | strains |
| A | 1 | − | I | − | <5% | + | − | − | |
| B | 1 | + | I | − | <5% | + | − | − | |
| C | 1 | + | II | − | <5% | + | − | − | HP3A11 |
| D | 2 | + | II | + | <5% | + | − | − | HP4G1, |
| | | | | | | | | | HP5G4 |
| E | 4 | − | I | − | >1% | + | − | − | HL045PA1 |
| F | 5 | − | I | − | >1% | + | − | − | HL043PA1 |
| G | 6 | + | II | + | >5% | − | + | + | HL110PA3, |
| | | | | | | | | | HL110PA4 |

ABC XP = ATP binding cassette transporter
DBRR = DNA binding response regulator
PGK = phosphoglycerate kinase

[0064] In certain embodiments, the composition comprises at least one strain of a P. acnes microbe that corresponds to group A of Table 1. In certain embodiments, the composition comprises at least one strain of a P. acnes microbe that corresponds to group B of Table 1. In certain embodiments, the composition comprises at least one strain of a P. acnes microbe that corresponds to group C of Table 1. In certain embodiments, the composition comprises at least one strain of a P. acnes microbe that corresponds to group D of Table 1.

[0065] In certain embodiments, the composition comprises at least one strain of a P. acnes microbe that corresponds to groups A, B, C or D of Table 1. In certain embodiments, the composition comprises at least two strains of a P. acnes microbe that correspond to groups A, B, C or D of Table 1. In certain embodiments, the composition comprises at least three strains of a P. acnes microbe that correspond to groups A, B, C or D of Table 1. In certain embodiments, the composition comprises at least four strains of a P. acnes microbe that correspond to groups A, B, C or D of Table 1. In certain embodiments, the composition comprises at least five strains of a P. acnes microbe that correspond to groups A, B, C, or D of Table 1.

[0066] In some embodiments, the composition does not comprise a strain of P. acnes that corresponds to group E of Table 1. In some embodiments, the composition does not comprise a strain of P. acnes that corresponds to group F of Table 1. In some embodiments, the composition does not comprise a strain of P. acnes that corresponds to group G of Table 1.

[0067] In some embodiments, the composition comprises at least one strain of P. acnes that corresponds to group A of Table 1, but does not comprise a strain of P. acnes that corresponds to groups E, F or G of Table 1. In some embodiments, the composition comprises at least one strain of P. acnes that corresponds to group B of Table 1, but does not comprise a strain of P. acnes that corresponds to groups E, F or G of Table 1. In some embodiments, the composition comprises at least one strain of P. acnes that corresponds to group C of Table 1, but does not comprise a strain of P. acnes that corresponds to groups E, F or G of Table 1. In some embodiments, the composition comprises at least one strain of P. acnes that corresponds to group D of Table 1, but does not comprise a strain of P. acnes that corresponds to groups E, F or G of Table 1. In some embodiments, the composition comprises at least one strain of P. acnes that corresponds to group C of Table 1 and at least one strain of P. acnes that corresponds to group D of Table 1, but does not comprise a strain of P. acnes that corresponds to groups E, F or G of Table 1.

### Health-Associated Microbes

[0068] Provided herein are compositions for treating and preventing skin disorders, wherein the compositions comprise a health-associated microbe. Generally, the term, “health-associated microbe,” as used herein, refers to a microbe that is more prevalent in healthy or individuals free of a skin disease than in individuals diagnosed with the skin disease. In some embodiments, health-associated microbes disclosed herein are associated with desirable or optimal oral health. In some embodiments, health-associated microbes disclosed herein are associated with desirable or optimal gastrointestinal health.

[0069] Health-associated microbes include probiotics described herein. Health-associated microbes include healthy P. acnes described herein. In some embodiments, health-associated microbes are microbes that can replace at least a portion of pathogenic microbes. In some embodiments, health-associated microbes are microbes that can alter a microbiome to increase a percentage of health associated strains. In some embodiments, health-associated microbes inhibit the growth of pathogenic microbes or disease associated microbes. In some embodiments, health-associated microbes out-compete pathogenic or disease associated microbes. In certain embodiments, the skin disorder is selected from at least one of acne vulgaris (acne), eczema, seborrheic dermatitis, psoriasis, or rosacea. In some embodiments, the skin disorder is acne.

[0070] In certain embodiments, health-associated microbes disclosed herein are associated with desirable health, optimal health or improved health relative to the health of a subject with a disease, disorder or condition disclosed herein. Desirable health, optimal health or improved health may be characterized as free of a condition, disorder or disease. Desirable health, optimal health or improved health may be characterized as free of one or more symptoms of a condition, disorder or disease. Desirable health, optimal health or improved health may be characterized as free of all symptoms of a condition, disorder or disease. Desirable health, optimal health or improved health may be characterized as improved health relative to health with a disease, disorder or condition. In certain embodiments, the health-associated microbe is associated with optimal, desirable or improved skin health. In certain embodiments, the health-associated microbe is associated with optimal, desirable or improved oral health. In certain embodiments, the health-associated microbe is associated with optimal, desirable or improved digestive health. In certain embodiments, the health-associated microbe is a P. acnes strain associated with skin health, oral health, digestive health, or any combination thereof, that is optimal, desirable or improved relative to respective health associated with a condition, disorder or disease.

[0071] In certain embodiments, there is a statistically significant difference in the presence of the health-associated microbe on the skin of an individual free of a disease when compared to an individual with the disease. In certain embodiments, there is at least about a 10% greater quantity of a health-associated microbe on the skin of an individual free of a disease when compared to an individual with the disease. In certain embodiments, there is at least about a 50% greater quantity of a health-associated microbe on the skin of an individual free of a disease when compared to an individual with the disease. In certain embodiments, there is at least about a 100% greater quantity of a health-associated microbe on the skin of an individual free of a disease when compared to an individual with the disease. In certain embodiments, there is at least about a 2-fold greater presence of the health-associated microbe on the skin of an individual free of a disease when compared to an individual with the disease. In certain embodiments, there is at least about a 3-fold greater presence of the health-associated microbe on the skin of an individual free of a disease when compared to an individual with the disease. In certain embodiments, there is at least about a 5-fold greater presence of the health-associated microbe on the skin of an individual free of a disease when compared to an individual with the disease. In certain embodiments, there is at least about a 10-fold greater presence of the health-associated microbe on the skin of an individual free of a disease when compared to an individual with the disease.

[0072] In certain embodiments, the health-associated microbe is an isolated species of bacteria. In certain embodiments, the health-associated microbe is a purified species of bacteria. In certain embodiments, the health-associated microbe is an isolated and purified species of bacteria. In certain embodiments, the health-associated microbe is an isolated strain of bacteria. In certain embodiments, the health-associated microbe is a purified strain of bacteria. In certain embodiments, the health-associated microbe is an isolated and purified strain of bacteria. In certain embodiments, the health-associated microbe is an isolated species of Propionibacterium. In certain embodiments, the health-associated microbe is a purified species of Propionibacterium. In certain embodiments, the health-associated microbe is an isolated and purified species of Propionibacterium. In certain embodiments, the health-associated microbe is an isolated strain of P. acnes. In certain embodiments, the health-associated microbe is a purified strain of P. acnes. In certain embodiments, the health-associated microbe is an isolated and purified strain of P. acnes.

[0073] As described herein, some strains of P. acnes are associated with acne and some strains of P. acnes are associated with skin free of acne or disease. These P. acnes strains can be differentiated at the genetic level by using nucleic acid sequence determination methods known in the art such as PCR, restriction mapping, Sanger sequencing, and next-generation sequencing. In some instances, a health-associated microbe disclosed herein is beneficial for the treatment of a specific skin disorder, but not all skin disorders. In some instances, a health-associated microbe disclosed herein is beneficial for the treatment of a plurality of skin disorder, but not all skin disorders. In some instances, a health-associated microbe disclosed herein is beneficial for the treatment any skin disorder. By way of non-limiting example, a health-associated microbe disclosed herein may be beneficial only for acne, but not for eczema, seborrheic dermatitis, or psoriasis. In another instance, a health-associated microbe disclosed herein is beneficial only for eczema, but not for acne, seborrheic dermatitis, or psoriasis. In another instance, a health-associated microbe disclosed herein is beneficial only for psoriasis, but not for acne, seborrheic dermatitis, or eczema. In another instance, a health-associated microbe disclosed herein is beneficial only for seborrheic dermatitis, but not for psoriasis, acne, or eczema. In some instances, a health-associated microbe disclosed herein is beneficial for eczema, acne and psoriasis. In some instances, a health-associated microbe disclosed herein is beneficial for acne and a condition selected from eczema, seborrheic dermatitis. In some instances, a health-associated microbe disclosed herein is beneficial for eczema, seborrheic dermatitis, acne and psoriasis.

[0074] In certain embodiments, compositions disclosed herein comprise at least one health-associated microbe, wherein the health-associated microbe is a strain of P. acnes or bacteria that is associated with healthy or normal skin. In certain embodiments, compositions disclosed herein comprise at least one health-associated microbe, wherein the health-associated microbe is a strain of P. acnes or bacteria that produces low levels of inflammatory mediators when incubated with a subject's own keratinocytes or pooled keratinocytes from multiple subjects.

[0075] In certain embodiments, compositions comprise an isolated Propionibacterium strain. In some embodiments the isolated Propionibacterium strain is a purified strain. In certain embodiments, compositions comprise a mixture of about 2 to about 10 isolated Propionibacterium strains. In certain embodiments, compositions comprise a mixture of about 3 to about 8 isolated Propionibacterium strains. In certain embodiments, compositions comprise a mixture of about 2 to about 5 isolated Propionibacterium strains. In certain embodiments, compositions comprise a mixture of about 3 to about 6 isolated Propionibacterium strains. In certain embodiments, the isolated Propionibacterium strain is isolated based on its phylotype or ribotype. Propionibacterium strains are disclosed throughout the instant specification.

[0076] In certain embodiments, compositions consist essentially of an isolated Propionibacterium strain and a pharmaceutically acceptable excipient or biological stabilizer. In certain embodiments, compositions consist essentially of two isolated Propionibacterium strains and a pharmaceutically acceptable excipient or biological stabilizer. In some embodiments the isolated Propionibacterium strain is a purified strain. In certain embodiments, compositions consist essentially of about 2 to about 10 isolated Propionibacterium strains, and a pharmaceutically acceptable excipient or biological stabilizer disclosed herein. In certain embodiments, compositions consist essentially of about 3 to about 8 isolated Propionibacterium strains, and a pharmaceutically acceptable excipient or biological stabilizer disclosed herein. In certain embodiments, compositions consist essentially of about 2 to about 5 isolated Propionibacterium strains, and a pharmaceutically acceptable excipient or biological stabilizer disclosed herein. In certain embodiments, compositions consist essentially of about 3 to about 6 isolated Propionibacterium strains, and a pharmaceutically acceptable excipient or biological stabilizer disclosed herein. In certain embodiments, the isolated strain is isolated based on its phylotype or ribotype. Exemplary Propionibacterium strains and a pharmaceutically acceptable excipient or biological stabilizer are described throughout the instant specification.

[0077] In certain embodiments, compositions consist essentially of an isolated Propionibacterium strain, a pharmaceutically acceptable excipient or biological stabilizer, and at least one additional active ingredient disclosed herein. In certain embodiments, compositions consist essentially of two isolated Propionibacterium strains, a pharmaceutically acceptable excipient or biological stabilizer, and at least one additional active ingredient disclosed herein. In some embodiments the isolated Propionibacterium strain is a purified strain. In certain embodiments, compositions consist essentially of about 2 to about 10 isolated Propionibacterium strains, a pharmaceutically acceptable excipient or biological stabilizer, and at least one additional active ingredient disclosed herein. In certain embodiments, compositions consist essentially of about 3 to about 8 isolated Propionibacterium strains, a pharmaceutically acceptable excipient or biological stabilizer, and at least one additional active ingredient disclosed herein. In certain embodiments, compositions consist essentially of about 2 to about 5 isolated Propionibacterium strains, a pharmaceutically acceptable excipient or biological stabilizer, and at least one additional active ingredient disclosed herein. In certain embodiments, compositions consist essentially of about 3 to about 6 isolated Propionibacterium strains, a pharmaceutically acceptable excipient or biological stabilizer, and at least one additional active ingredient disclosed herein. In certain embodiments, the isolated strain is isolated based on its phylotype or ribotype. Exemplary Propionibacterium strains and a pharmaceutically acceptable excipient or biological stabilizer are described throughout the instant specification.

[0078] In certain embodiments, compositions comprise an isolated P. acnes strain. In some embodiments the isolated P. acnes strain is a purified strain. In certain embodiments, compositions comprise a mixture of about 2 to about 10 isolated P. acnes strains. In certain embodiments, compositions comprise a mixture of about 3 to about 8 isolated P. acnes strains. In certain embodiments, compositions comprise a mixture of about 2 to about 5 isolated P. acnes strains. In certain embodiments, compositions comprise a mixture of about 3 to about 6 isolated P. acnes strains. In certain embodiments, the isolated P. acnes strain is isolated based on its phylotype or ribotype.

[0079] In certain embodiments, compositions consist essentially of an isolated P. acnes strain and a pharmaceutically acceptable excipient or biological stabilizer. In certain embodiments, compositions consist essentially of two isolated P. acnes strains and a pharmaceutically acceptable excipient or biological stabilizer. In some embodiments the isolated P. acnes strain is a purified strain. In certain embodiments, compositions consist essentially of about 2 to about 10 isolated P. acnes strains and a pharmaceutically acceptable excipient or biological stabilizer disclosed herein. In certain embodiments, compositions consist essentially of about 3 to about 8 isolated P. acnes strains and a pharmaceutically acceptable excipient or biological stabilizer disclosed herein. In certain embodiments, compositions consist essentially of about 2 to about 5 isolated P. acnes strains and a pharmaceutically acceptable excipient or biological stabilizer disclosed herein. In certain embodiments, compositions consist essentially of about 3 to about 6 isolated P. acnes strains and a pharmaceutically acceptable excipient or biological stabilizer disclosed herein. In certain embodiments, the isolated strain is isolated based on its phylotype or ribotype. Exemplary P. acnes strains and a pharmaceutically acceptable excipient or biological stabilizer are described throughout the instant specification.

[0080] In certain embodiments, compositions consist essentially of an isolated P. acnes strain, a pharmaceutically acceptable excipient or biological stabilizer, and at least one additional active ingredient disclosed herein. In certain embodiments, compositions consist essentially of two isolated P. acnes strains, a pharmaceutically acceptable excipient or biological stabilizer, and at least one additional active ingredient disclosed herein. In some embodiments the isolated P. acnes strain is a purified strain. In certain embodiments, compositions consist essentially of about 2 to about 10 isolated P. acnes strains, a pharmaceutically acceptable excipient or biological stabilizer, and at least one additional active ingredient disclosed herein. In certain embodiments, compositions consist essentially of about 3 to about 8 isolated P. acnes strain, a pharmaceutically acceptable excipient or biological stabilizer, and at least one additional active ingredient disclosed herein. In certain embodiments, compositions consist essentially of about 2 to about 5 isolated P. acnes strains and a pharmaceutically acceptable excipient or biological stabilizer disclosed herein, a pharmaceutically acceptable excipient or biological stabilizer, and at least one additional active ingredient disclosed herein. In certain embodiments, compositions consist essentially of about 3 to about 6 isolated P. acnes strain, a pharmaceutically acceptable excipient or biological stabilizer, and at least one additional active ingredient disclosed herein. In certain embodiments, the isolated strain is isolated based on its phylotype or ribotype. Exemplary P. acnes strains and a pharmaceutically acceptable excipient or biological stabilizer are described throughout the instant specification.

[0081] In certain embodiments, compositions disclosed herein comprise at least one P. acnes strain having a health-associated phylotype. In certain embodiments, the health-associated phylotype is selected from type I, type II, and type III. In some embodiments, compositions disclosed herein comprise at least two P. acnes strains having health-associated phylotypes, wherein the health-associated phylotypes are a combination of type I, type II, and type III. In certain embodiments, the type I phylotype is selected from type IA, type IB, and type IC. In certain embodiments, the type IA phylotype is selected from type IA₁ and type IA₂. Strains can be phylotyped as in McDowell et al. (PLoS ONE 8(9): e70897 (2013)).

[0082] In some embodiments, compositions disclosed herein comprise a combination of health-associated microbes, wherein the health-associated microbes comprise a combination of healthy strains of P. acnes. In some embodiments, combinations of healthy strains of P. acnes comprise a combination of strains of P. acnes of a plurality of ribotypes. In some embodiments, the plurality of ribotypes comprises at least two ribotypes selected from RT1, RT2, RT3, RT7, RT8, RT9, and RT10. In some embodiments, the plurality of ribotypes comprises at least two ribotypes selected from RT1, RT2 and RT3. In certain embodiments, the plurality of ribotypes comprises at least two ribotypes selected from RT1, RT2, RT3 and not RT6. In certain embodiments, the plurality of ribotypes comprises ribotypes selected from RT1 and RT2. In certain embodiments, the plurality of ribotypes comprises ribotypes selected from RT1 and RT3. In certain embodiments, the plurality of ribotypes comprises ribotypes selected from RT2 and RT3. In certain embodiments, the plurality of ribotypes comprises RT1, but not RT6. In certain embodiments, the plurality of ribotypes comprises RT2, but not RT6.

[0083] In some embodiments, compositions disclosed herein comprise a combination of health-associated microbes, wherein the health-associated microbes comprise a combination of healthy strains of P. acnes. In some embodiments, the combination comprises a first strain of P. acnes and a second strain of P. acnes. In some embodiments, the first strain of P. acnes is of a first ribotype and a second strain of P. acnes is of a second ribotype. In some embodiments, the first ribotype and the second ribotype are the same. In some embodiments, the first ribotype and the second ribotype are different. In some embodiments, the first ribotype is RT1 and the second ribotype is RT1. In some embodiments, the first ribotype is RT2 and the second ribotype is RT2. In some embodiments, the first ribotype is RT1 and the second ribotype is RT2. In some embodiments, the first ribotype is RT1 and the second ribotype is RT3. In some embodiments, the first ribotype is RT2 and the second ribotype is RT3. In some embodiments, the first ribotype is RT1 and the second ribotype is not RT6. In some embodiments, the first ribotype is RT2 and the second ribotype is not RT6. In some embodiments, the first ribotype is RT3 and the second ribotype is not RT6.

[0084] In some embodiments, compositions disclosed herein comprise healthy strains of P. acnes, and do not comprise any other type of microbe or bacteria. In some embodiments, health-associated microbes disclosed herein comprise at least one health-associated strain of P. acnes, wherein the health-associated strain of P. acnes has a ribotype of RT1 or RT2. In some embodiments, health-associated microbes disclosed herein do not comprise a strain of P. acnes, other than a health-associated strain of P. acnes disclosed herein that has a ribotype selected from RT1 and RT2. In some embodiments, the health-associated microbes do not comprise a strain of P. acnes that has a ribotype RT6. In some embodiments, the health-associated microbes do not comprise a strain of P. acnes that expresses DNA binding response regulator or phosphoglycerate kinase, as described herein. In some embodiments, the health-associated microbes comprise a strain of P. acnes that expresses an ATP binding cassette transporter, as described herein.

[0085] In certain embodiments, the health-associated microbe does not comprise a strain with a sequence that is 95%, 97%, 98%, 99% or 100% homologous to a sequence selected from SEQ ID NO: 51, SEQ ID NO: 52, SEQ ID NO: 53, and SEQ ID NO: 54. In certain embodiments, the health-associated microbe does not comprise a strain with a sequence that is more than 50% homologous to a sequence selected from SEQ ID NO: 51, SEQ ID NO: 52, SEQ ID NO: 53, and SEQ ID NO: 54. In certain embodiments, the health-associated microbe does not comprise a strain with a sequence selected from SEQ ID NO: 51, SEQ ID NO: 52, SEQ ID NO: 53.

[0086] In certain embodiments, compositions disclosed herein comprise a health-associated microbe, wherein the health-associated microbe is Lactobacillus reuteri (referred to herein as L. reuteri), or a strain thereof. In certain embodiments, compositions disclosed herein comprise at least one L. reuteri strain selected from Korean Collection for Type Cultures (KCTC) deposited strains, such as KCTC 3679, KCTC 3594, KCTC 3678, and any combination thereof.

[0087] In certain embodiments, compositions disclosed herein comprise a health-associated microbe, wherein the health-associated microbe is Staphylococcus epidermidis (S. epidermidis). In certain embodiments, compositions disclosed herein comprise at least one S. epidermidis strain selected from 14.1.R1, AS1, AU 10, AU16, AU21, AU23, AU24, AU35, AU36, AU39, AU40, AU 44, AU48, AU53, AU60, AU73, AU81, FS1, G53, IS2, and a combination thereof.

### Selected, Transformed, or Engineered Bacteria

[0088] In certain embodiments, the compositions described herein comprise one or more strains of bacteria that is selected, transformed or engineered with a gene or gene mutation that is beneficial for a skin disorder. Thus, the bacteria have been transformed into a “non-pathogenic” form, or a health-associated form from a disease-associated form. In certain embodiments, a gene that contributes to pathogenesis of a skin disorder is deleted or mutated to inactivate or reduce the corresponding gene product. In certain embodiments, a gene that reduces the pathogenesis of a skin disorder is added, or mutated to activate or increase levels of the corresponding gene product. In certain embodiments, the bacteria are grown and selected from culture or selected from healthy disease free individuals.

[0089] In certain embodiments, selected, transformed, or engineered bacteria are to be delivered as a probiotic via compositions and methods disclosed herein. In certain embodiments, selected, transformed, or engineered bacteria disclosed herein comprise a gene encoding a deoxyribose operon repressor (deoR). In certain embodiments, selected, transformed, or engineered bacteria disclosed herein express a deoxyribose operon repressor. In certain embodiments, selected, transformed, or engineered bacteria disclosed herein comprise a gene encoding a Type II lipase. In certain embodiments, selected, transformed, or engineered bacteria disclosed herein express Type II lipase. By way of non-limiting example, the Type II lipase may be a glycerol-ester hydrolase B (GehB). In certain embodiments, selected, transformed, or engineered bacteria disclosed herein do not comprise a gene encoding Type I lipase. In certain embodiments, selected, transformed, or engineered bacteria disclosed herein do not express a Type I lipase. By way of non-limiting example, the type I lipase may be a glycerol-ester hydrolase A (GehA). In certain embodiments, selected, transformed, or engineered bacteria do not comprise a pIMPLE plasmid. In certain embodiments, selected, transformed, or engineered bacteria disclosed herein comprise a gene encoding an ABC transporter. In certain embodiments, selected, transformed, or engineered bacteria express an ABC transporter. In certain embodiments, selected, transformed, or engineered bacteria disclosed herein do not comprise a gene encoding a phosphoglycerate kinase. In certain embodiments, selected, transformed, or engineered bacteria do not comprise a phosphoglycerate kinase. In certain embodiments, selected, transformed, or engineered bacteria disclosed herein do not comprise a gene encoding a DNA binding response regulator. In certain embodiments, selected, transformed, or engineered bacteria do not comprise a DNA binding response regulator.

[0090] In certain embodiments, selected, transformed, or engineered bacteria disclosed herein do not express a dermatin-sulfate adhesin (e.g., DSA1, DSA2). In certain embodiments, selected, transformed, or engineered bacteria disclosed herein do comprise a nucleic acid encoding a dermatin-sulfate adhesin (e.g., DSA1, DSA2). The absence or deletion of dermatin-sulfate adhesins may disable adhesion of microbes to keratinocytes.

[0091] In certain embodiments, selected, transformed, or engineered bacteria disclosed herein express a hyaluronidase. In some embodiments, the hyaluronidase is a hyaluronidase expressed by a Group B Streptococcus strain of bacteria. In certain embodiments, selected, transformed, or engineered bacteria disclosed herein do not express a hyaluronidase. In certain embodiments, selected, transformed, or engineered bacteria disclosed herein comprise a nucleic acid encoding a hyaluronidase. In some embodiments, the nucleic acid encodes a hyaluronidase expressed by a Group B Streptococcus strain of bacteria. In certain embodiments, selected, transformed, or engineered bacteria disclosed herein do not comprise a nucleic acid encoding a hyaluronidase. In certain embodiments, a strain of bacteria that is selected, transformed, or engineered bacteria is present or has increased expression of a hyaluronidase gene relative to the strain of bacteria when it is not selected, transformed, or engineered. In certain embodiments, a strain of bacteria that is selected, transformed, or engineered bacteria is present or has increased hyaluronidase activity relative to the strain of bacteria when it is not selected, transformed, or engineered. In certain embodiments, a strain of bacteria that is selected, transformed, or engineered bacteria is present or has reduced hyaluronidase activity relative to the strain of bacteria when it is not selected, transformed, or engineered. In certain embodiments, selected, transformed, or engineered bacteria disclosed herein lack a hyaluronidase gene.

[0092] In certain embodiments, selected, transformed, or engineered bacteria disclosed herein have reduced transposase 2 enzyme activity. In certain embodiments, selected, transformed, or engineered bacteria disclosed herein lack transposase 2 enzyme activity. In certain embodiments, a selected, transformed, or engineered strain of bacteria disclosed herein has reduced activity relative to the strain when it is not selected, transformed, or engineered, respectively.

[0093] In certain embodiments, selected, transformed, or engineered bacteria disclosed herein confer an antibiotic sensitivity to macrolide and tetracycline antibiotics. In certain embodiments, selected, transformed, or engineered bacteria disclosed herein have an absence or deletion of a thiopeptide encoding island, respectively. In certain embodiments, selected, transformed, or engineered bacteria disclosed herein have a presence or addition of a tyrosine decarboxylase island (which increases intracellular pH under stress to tolerate acidic environments), respectively. In certain embodiments, selected, transformed, or engineered bacteria disclosed herein have an ability to metabolize gelatin.

[0094] In certain embodiments, selected, transformed, or engineered bacteria comprise selected, transformed, or engineered S. epidermis, respectively. In certain embodiments, the selected, transformed, or engineered bacteria comprise selected, transformed, or engineered P. acnes.

[0095] In certain embodiments, the bacteria are transformed using recombinant DNA techniques known in the art. In certain embodiments, the bacteria are transformed by growing bacteria under selective pressure to acquire or lose a gene, gene product, or expression thereof. In a certain embodiment, the bacteria are transformed using CRISPR technology. In a certain embodiment, the bacteria are transformed using homologous recombination.

[0096] In certain embodiments, the selected, transformed, or engineered bacteria comprise a selected, transformed, or engineered P. acnes strain. In certain embodiments, the selected, transformed, or engineered bacteria comprise a selected, transformed, or engineered P. acnes strain, wherein the selected, transformed, or engineered P. acnes strain has a ribotype selected from RT1, RT2, RT3, RT4, RT5, RT7, RT8, RT9, and RT10. In certain embodiments, the selected, transformed, or engineered bacteria comprise a selected, transformed, or engineered P. acnes strain, wherein the selected, transformed, or engineered P. acnes strain has a ribotype selected from RT1, RT2, RT3, RT7, RT8, RT9, and RT10. In certain embodiments, the selected, transformed, or engineered bacteria comprise a selected, transformed, or engineered P. acnes strain, wherein the selected, transformed, or engineered P. acnes strain has a ribotype selected from RT1, RT2, RT3, RT7, RT8, RT9, and RT10. In certain embodiments, the selected, transformed, or engineered bacteria comprise a selected, transformed, or engineered P. acnes strain, wherein the selected, transformed, or engineered P. acnes strain has a ribotype selected from RT1, RT2, RT3, and not RT6. In certain embodiments, the selected, transformed, or engineered bacteria comprise a selected, transformed, or engineered P. acnes strain, wherein the selected, transformed, or engineered P. acnes strain has a ribotype selected from RT1 and RT2. In certain embodiments, the selected, transformed, or engineered bacteria comprise a selected, transformed, or engineered P. acnes strain, wherein the selected, transformed, or engineered P. acnes strain has a ribotype of RT1. In certain embodiments, the selected, transformed, or engineered bacteria comprise a selected, transformed, or engineered P. acnes strain, wherein the selected, transformed, or engineered P. acnes strain has a ribotype of RT2. In certain embodiments, the selected, transformed, or engineered bacteria are an RT1 strain of P. acnes. In certain embodiments, the selected, transformed, or engineered bacteria are an RT2 strain of P. acnes. In certain embodiments, the selected, transformed, or engineered bacteria are an RT3 strain of P. acnes. In certain embodiments, the selected, transformed, or engineered bacteria are not an RT6 strain of P. acnes.

### Markers

[0097] Disclosed herein are compositions that comprise probiotics and health-associated microbes. Probiotics and health-associated microbes disclosed herein generally comprise at least one strain of bacteria, wherein the at least one strain of bacteria exhibits a health-associated presence, health-associated absence or health-associated expression level of at least one marker. In some instances, health-associated expression of the at least one marker is a lack of expression. In some instances, health-associated expression of the at least one marker is expression that is low as compared to expression of the at least one marker in a reference strain. In some instances, the reference strain is a pathogenic strain. In some instances, the reference strain is not a health-associated strain. In some instances, health-associated expression of the at least one marker is expression that is high as compared to expression of the at least one marker in a reference strain.

[0098] In some embodiments, the marker is a nucleic acid. In some embodiments, the nucleic acid comprises a gene encoding the marker or a portion thereof. In some embodiments, the nucleic acid is a gene encoding the marker or a portion thereof. In some embodiments, the marker is a protein. In some embodiments, the marker is a peptide (e.g., less than or equal to 100 amino acids). In some embodiments, the marker is not a nucleic acid or a protein. Non-limiting examples of a marker that neither comprises a nucleic acid or protein include glycans and lipids.

[0099] Exemplary markers of health-associated microbes disclosed herein include, but are not limited to, a deoxyribose operon repressor, a CRISPR associated protein (Cas), a lipase, an ATP binding cassette transporter, a DNA binding response regulator, a phosphoglycerate kinase, dermatin-sulfate adhesin, and hyaluronidase. In some instances, the at least one strain of bacteria comprises a plasmid. In some instances, presence or absence of the plasmid is a marker. By way of non-limiting example, the plasmid may be a pIMPLE plasmid disclosed herein. As further described herein, presence of a deoR, a type II lipase, an ABC transporter, or a Cas5, or a combination thereof, is generally associated with probiotics and health-associated microbes disclosed herein. In contrast, probiotics and health-associated microbes disclosed herein are generally associated with an absence or low expression of a pIMPLE plasmid, a type I lipase, a DNA binding response regulator, a phosphoglycerate kinase, or dermatin-sulfate adhesin, or a combination thereof. However, it would be understood to one of skill in the art that nature presents exceptions to such generalities. Therefore, expression patterns of these markers that are alternative or contrary to those described herein are contemplated as well. Compositions comprising one or more strains characterized by such markers are further characterized herein, including the description as follows.

deoR

[0100] In some embodiments, the marker is a deoxyribose operon repressor (deoR) protein. In some embodiments, the marker is a nucleic acid encoding a deoxyribose operon repressor (deoR). In some embodiments, the deoR is a deoR family transcriptional regulator expressed in Propionibacterium acnes subsp. defendens (ATCC 11828, GenBank: AER05724.1). In certain embodiments, the at least one strain of bacteria has been selected, transformed, or engineered to acquire the presence of the deoR. In certain embodiments, the deoR has a sequence that is at least 80% homologous to SEQ ID NO: 1. In certain embodiments, the deoR has a sequence that is at least 90% homologous to SEQ ID NO: 1. In certain embodiments, the deoR has a sequence that is at least 95% homologous to SEQ ID NO: 1. In certain embodiments, the deoR has a sequence that is at least 97% homologous to SEQ ID NO: 1. In certain embodiments, the deoR has a sequence that is at least 98% homologous to SEQ ID NO: 1. In certain embodiments, the deoR has a sequence that is at least 99% homologous to SEQ ID NO: 1. In certain embodiments, the deoR has a sequence that is 100% homologous to SEQ ID NO: 1. In certain embodiments, the at least one strain of bacteria has greater expression or activity of a deoxyribose operon repressor than a reference strain (e.g., pathogenic strain, not a health-associated strain). In certain embodiments, the at least one strain has at least about 1.5-fold, at least about 2-fold, at least about 3-fold, at least about 5-fold or at least about 10-fold greater expression or activity of the deoxyribose operon repressor as compared to the reference strain.

pIMPLE Plasmid

[0101] In some embodiments, the marker is a pIMPLE plasmid. In some embodiments, the marker is an absence of a pIMPLE plasmid. In some embodiments, the marker is a low percentage of a pIMPLE plasmid (e.g., <10%). In some embodiments, compositions disclosed herein comprise at least one strain of bacteria, wherein the at least one strain of bacteria does not comprise a pIMPLE plasmid. In certain embodiments, the pIMPLE plasmid has a sequence that is at least about 80% homologous to SEQ ID NO: 2. In certain embodiments, the pIMPLE plasmid has a sequence that is at least about 90% homologous to SEQ ID NO: 2. In certain embodiments, the pIMPLE plasmid has a sequence that is at least about 95% homologous to SEQ ID NO: 2. In certain embodiments, the pIMPLE plasmid has a sequence that is at least about 97% homologous to SEQ ID NO: 2. In certain embodiments, the pIMPLE plasmid has a sequence that is at least about 98% homologous to SEQ ID NO: 2. In certain embodiments, the pIMPLE plasmid has a sequence that is at least about 99% homologous to SEQ ID NO: 2. In certain embodiments, the pIMPLE plasmid has a sequence that is 100% homologous to SEQ ID NO: 2. In certain embodiments, a plasmid with at least 80%, 90%, 95%, 98%, 99%, or 100% homology to SEQ ID NO: 2 is partially or completely deleted from the at least one strain of bacteria. In certain embodiments, a plasmid with at least 80%, 90%, 95%, 98%, 99%, or 100% homology to SEQ ID NO: 2 is disrupted by an insertion of one or more nucleotides or a introduction of a frameshift mutation in the a selected, transformed, or engineered strain of bacteria. In certain embodiments, the at least one strain of bacteria contains portions of a complete pIMPLE plasmid (SEQ ID NO: 2). In certain embodiments, the at least one strain of bacteria may comprise less than about 25%, 20%, 15%, 14%, 13%, 12%, 11%, 10%, 9%, 8%, 7%, 6% of the complete pIMPLE sequence set forth in SEQ ID NO: 2. In certain embodiments, the at least one strain of bacteria does not comprise a specific portion of the pIMPLE plasmid that is present in an RT6 strain or any other disease associated strain. In certain embodiments, the at least one strain of bacteria comprises a low copy number of a pIMPLE plasmid (SEQ ID NO: 2). In certain embodiments, the at least one strain of bacteria comprises less than 5 copies of pIMPLE plasmid per bacterial genome. In certain embodiments, the at least one strain of bacteria comprises less than 4 copies of pIMPLE plasmid per bacterial genome. In certain embodiments, the at least one strain of bacteria comprises less than 3 copies of pIMPLE plasmid per bacterial genome. In certain embodiments, the at least one strain of bacteria comprises less than 2 copies of pIMPLE plasmid per bacterial genome. In certain embodiments, the at least one strain of bacteria comprises 1 copy of pIMPLE plasmid per bacterial genome. In certain embodiments, the at least one strain of bacteria comprises a low percentage of pIMPLE plasmid (SEQ ID NO: 2). In certain embodiments, the bacteria comprise less than about 15%, 14%, 13%, 12%, 11%, 10%, 9%, 8%, 7%, 6%, 5%, 4%, 3%, 2%, 1% pIMPLE plasmid. In certain embodiments, the at least one strain of bacteria comprises less than about 1.0%, 0.9%, 0.8%, 0.7%, 0.6%, 0.5%, 0.4%, 0.3%, 0.2%, 0.1% pIMPLE plasmid. pIMPLE plasmid percentage can be determined by next-generation sequencing of P. acnes bacteria, as % reads aligned. In certain embodiments, the pIMPLE percentage is percentage of total sequencing reads that align to pIMPLE from HL096PA1 (an RT5).

### Lipases

[0102] In some embodiments, the marker is a lipase. In some embodiments, the marker is a nucleic acid encoding a lipase. In some embodiments, the marker is an absence of a nucleic acid encoding a lipase. In some embodiments, compositions disclosed herein comprise a strain of bacteria that expresses a lipase. In some embodiments, the lipase is Type I lipase. In some embodiments, the lipase is Type II lipase. In some embodiments, the compositions disclosed herein comprise a strain of bacteria that does not express a lipase. In some embodiments, the compositions disclosed herein comprise a strain of bacteria that does not express a Type I lipase. In some embodiments, the compositions disclosed herein comprise a strain of bacteria that does not express a Type II lipase. In some embodiments, the strain of bacteria comprises a nucleic acid encoding a Type II lipase. Type I lipase and Type II lipase, as described herein, may be encoded by a similar nucleic acid. For example, a gene encoding Type I lipase will encode a Type II lipase upon a 6 bp deletion in the intergenic region and a single base deletion, the latter causing a frameshift that creates premature STOP codon, see, e.g., FIG. 7.

### Type I Lipase

[0103] In some embodiments, the marker is a Type I lipase. In some embodiments, compositions disclosed herein comprise at least one strain of bacteria, wherein the at least one strain of bacteria does not express a Type I lipase. In some embodiments, compositions disclosed herein comprise at least one strain of bacteria, wherein the at least one strain of bacteria does not comprise a nucleic acid encoding a Type I lipase. In certain embodiments, compositions disclosed herein comprise at least one strain of bacteria, wherein the at least one strain of bacteria has been selected, transformed, or engineered for an absence of Type I lipase expression or activity. In certain embodiments, compositions disclosed herein comprise at least one strain of bacteria, wherein the at least one strain of bacteria has been selected, transformed, or engineered for the presence of Type I lipase expression or activity. In certain embodiments, compositions disclosed herein comprise at least one strain of bacteria, wherein the strain has been selected, transformed, or engineered for lower expression or activity of Type I lipase relative to a reference strain (e.g., pathogenic strain, not a health-associated strain). In certain embodiments, at least one strain of bacteria has at least about 1.5-fold lower expression or activity of Type I lipase compared to the reference strain. In certain embodiments, at least one strain of bacteria has at least about 2-fold lower expression or activity of Type I lipase compared to the reference strain. In certain embodiments, at least one strain of bacteria has at least about 3-fold lower expression or activity of Type I lipase compared to the reference strain. In certain embodiments, at least one strain of bacteria has at least about 5-fold lower expression or activity of Type I lipase compared to the reference strain. In certain embodiments, at least one strain of bacteria has at least about 10-fold lower expression or activity of Type I lipase compared to the reference strain.

[0104] In some embodiments, compositions disclosed herein comprise at least one strain of bacteria, wherein the at least one strain of bacteria expresses a Type I lipase. In certain embodiments, compositions disclosed herein comprise at least one strain of bacteria, wherein the at least one strain of bacteria has been selected, transformed, or engineered for the presence of Type I lipase expression or activity. In certain embodiments, compositions disclosed herein comprise at least one strain of bacteria, wherein the strain has been selected, transformed, or engineered for greater expression or activity of Type I lipase relative to the reference strain.

[0105] In some embodiments, at least a portion of the Type I lipase is encoded by a sequence of SEQ ID NO: 10. In some embodiments, at least a portion of the Type I lipase is encoded by a sequence that is at least 80% homology to SEQ ID NO: 10. In some embodiments, at least a portion of the Type I lipase is encoded by a sequence that is at least 90% homology to SEQ ID NO: 10. In some embodiments, at least a portion of the Type I lipase is encoded by a sequence that is at least 95% homology to SEQ ID NO: 10. In some embodiments, at least a portion of the Type I lipase is encoded by a sequence that is at least 97% homology to SEQ ID NO: 10. In some embodiments, at least a portion of the Type I lipase is encoded by a sequence that is at least 98% homology to SEQ ID NO: 10. In some embodiments, at least a portion of the Type I lipase is encoded by a sequence that is at least 99% homology to SEQ ID NO: 10. In some embodiments, at least a portion of the Type I lipase is encoded by a sequence that is at least 80% homology to SEQ ID NO: 10. In some embodiments, at least a portion of the Type I lipase is encoded by a sequence of SEQ ID NO: 60. In some embodiments, at least a portion of the Type I lipase is encoded by a sequence that is at least 80% homology to SEQ ID NO: 60. In some embodiments, at least a portion of the Type I lipase is encoded by a sequence that is at least 90% homology to SEQ ID NO: 60. In some embodiments, at least a portion of the Type I lipase is encoded by a sequence that is at least 95% homology to SEQ ID NO: 60. In some embodiments, at least a portion of the Type I lipase is encoded by a sequence that is at least 97% homology to SEQ ID NO: 60. In some embodiments, at least a portion of the Type I lipase is encoded by a sequence that is at least 98% homology to SEQ ID NO: 60. In some embodiments, at least a portion of the Type I lipase is encoded by a sequence that is at least 99% homology to SEQ ID NO: 60. In some embodiments, at least a portion of the Type I lipase is encoded by a sequence that is at least 80% homology to SEQ ID NO: 60.

[0106] In certain embodiments, a nucleic acid with at least 80%, 90%, 95%, 98%, 99%, or 100% homology to SEQ ID NO: 10 is partially or completely deleted from the at least one strain. In certain embodiments, the nucleic acid is deleted by at least about 5%, at least about 10%, at least about 15%, at least about 20%, at least about 25%, at least about 30%, at least about 35%, at least about 40%, at least about 45%, at least about 50%, at least about 55%, at least about 60%, at least about 65%, at least about 70%, at least about 75%, at least about 80%, at least about 85%, at least about 90%, at least about 95% or more from the 3 prime end of the nucleic acid. In certain embodiments, the nucleic acid is deleted by at least about 5%, at least about 10%, at least about 15%, at least about 20%, at least about 25%, at least about 30%, at least about 35%, at least about 40%, at least about 45%, at least about 50%, at least about 55%, at least about 60%, at least about 65%, at least about 70%, at least about 75%, at least about 80%, at least about 85%, at least about 90%, at least about 95% or more from the 5 prime end of the nucleic acid.

[0107] In certain embodiments, a nucleic acid with at least 80%, 90%, 95%, 98%, 99%, or 100% homology to SEQ ID NO: 10 is disrupted by an insertion of one or more nucleotides or a introduction of a frameshift mutation in the at least one strain. In certain embodiments, at least about 5%, at least about 10%, at least about 15%, at least about 20%, at least about 25%, at least about 30%, at least about 35%, at least about 40%, at least about 45%, at least about 50%, at least about 55%, at least about 60%, at least about 65%, at least about 70%, at least about 75%, at least about 80%, at least about 85%, at least about 90%, or at least about 95% of the nucleic acid with at least 80%, 90%, 95%, 98%, 99%, or 100% homology to SEQ ID NO: 10 is disrupted.

### Type II Lipase

[0108] In some embodiments, compositions disclosed herein comprise at least one strain of bacteria, wherein the at least one strain of bacteria expresses a Type II lipase. A non-limiting example of a Type II lipase is Lipase ADE00051, HMPREF0675_4856. In some embodiments, compositions disclosed herein comprise at least one strain of bacteria, wherein the at least one strain of bacteria comprises a nucleic acid encoding a Type II lipase. In certain embodiments, the at least one strain of bacteria has been selected, transformed, or engineered to express a Type II lipase. In certain embodiments, the at least one strain of bacteria has at least about 1.5-fold greater expression or activity of Type II lipase compared to a reference strain (e.g., pathogenic strain, not a health-associated strain). In certain embodiments, the at least one strain of bacteria has at least about 2-fold greater expression or activity of Type II lipase compared to the reference strain. In certain embodiments, the at least one strain of bacteria has at least about 3-fold greater expression or activity of Type II lipase compared to the reference strain. In certain embodiments, the at least one strain of bacteria has at least about 5-fold greater expression or activity of Type II lipase compared to the reference strain. In certain embodiments, the at least one strain of bacteria has at least about 10-fold greater expression or activity of Type II lipase compared to the reference strain.

[0109] In some embodiments, at least a portion of the type II lipase is expressed from a nucleic acid comprising SEQ ID NO.: 61. SEQ ID NO.: 61 is found in the complete circular genome of Propionibacterium acnes ATCC 11828 and starts at position 390,423 of ATCC 11828. The following subsequent positions are in reference to the first nucleotide of SEQ ID NO.: 61. The lipase coding sequence is bases 22-1032, referred to herein as ADE0051, HMPREF0675_4856, and SEQ ID NO.: 3. Bases 1-21 is an intergenic region. Type II Lipase has a G in position 7 and an A in position 16. In some embodiments, at least a portion of the type I lipase is expressed from a nucleic acid comprising SEQ ID NO.: 60. In contrast, relative to SEQ ID NO. 61, SEQ ID NO. 60 has a 6 bp sequence TAGATA inserted between base pairs 1 and 2, an A in position 7, a G in position 16, and a G between base pairs 145 and 146. SEQ ID NO.: 60 and SEQ ID NO.: 61 are shown in Table 8. FIG. 7 also illustrates the differences between sequences encoding Type I lipase and Type II lipase.

[0110] In certain embodiments, at least a portion of the Type II lipase is encoded by a nucleic acid with at least about 90% homology to SEQ ID NO: 3. In certain embodiments, at least a portion of the Type II lipase is encoded by a nucleic acid with at least about 95% homology to SEQ ID NO: 3. In certain embodiments, at least a portion of the Type II lipase is encoded by a nucleic acid with at least about 97% homology to SEQ ID NO: 3. In certain embodiments, at least a portion of the Type II lipase is encoded by a nucleic acid with at least about 97% homology to SEQ ID NO: 3. In certain embodiments, at least a portion of the Type II lipase is encoded by a nucleic acid with at least about 99% homology to SEQ ID NO: 3. In certain embodiments, at least a portion of the Type II lipase is encoded by a nucleic acid with 100% homology to SEQ ID NO: 3. In certain embodiments, at least a portion of the Type II lipase is encoded by a nucleic acid with at least about 90% homology to SEQ ID NO: 61. In certain embodiments, at least a portion of the Type II lipase is encoded by a nucleic acid with at least about 95% homology to SEQ ID NO: 61. In certain embodiments, at least a portion of the Type II lipase is encoded by a nucleic acid with at least about 97% homology to SEQ ID NO: 61. In certain embodiments, at least a portion of the Type II lipase is encoded by a nucleic acid with at least about 97% homology to SEQ ID NO: 61. In certain embodiments, at least a portion of the Type II lipase is encoded by a nucleic acid with at least about 99% homology to SEQ ID NO: 61. In certain embodiments, at least a portion of the Type II lipase is encoded by a nucleic acid with 100% homology to SEQ ID NO: 61.

### CRISPR/Cas5

[0111] In some embodiments, compositions disclosed herein comprise at least one strain of bacteria, wherein the at least one strain of bacteria comprises a CRISPR locus or a portion of a CRISPR locus. In some embodiments, compositions disclosed herein comprise at least one strain of bacteria, wherein the at least one strain of bacteria expresses a CRISPR-associated protein (Cas). By way of non-limiting example, the CRISPR-associated proteins include Cas5, Cas9, Cpf1, Cas3, Cas8a, Cas8b, Cas8c, Cas10d, Cse1, Cse2, Csy1, Csy2, Csy3, GSU0054, Cas10, Csm2, Cmr5, Cas10, Csx11, Csx10, Csf1, Csn2, Cas4, C2c1, C2c3, and C2c2.

[0112] In some embodiments, compositions disclosed herein comprise at least one strain of bacteria, wherein the at least one strain of bacteria expresses a Cas5. In some embodiments, compositions disclosed herein comprise at least one strain of bacteria, wherein the at least one strain of bacteria comprises a nucleic acid encoding a Cas5. In certain embodiments, the at least one strain of bacteria has been selected, transformed, or engineered to express a Cas5. In certain embodiments, the at least one strain of bacteria has at least about 1.5-fold greater expression or activity of Cas5 compared to a reference strain (e.g., pathogenic strain, not a health-associated strain). In certain embodiments, the at least one strain of bacteria has at least about 2-fold greater expression or activity of Cas5 compared to the reference strain. In certain embodiments, the at least one strain of bacteria has at least about 3-fold greater expression or activity of Cas5 compared to the reference strain. In certain embodiments, the at least one strain of bacteria has at least about 5-fold greater expression or activity of Cas5 compared to the reference strain. In certain embodiments, the at least one strain of bacteria has at least about 10-fold greater expression or activity of Cas5 compared to the reference strain.

[0113] In some instances, the at least one strain of bacteria expresses Cas5. In some embodiments, a strain of P. acnes is characterized as a health-associated P. acnes or a disease-associated P. acnes based on the presence of Cas5. In some embodiments, Cas5 is found in P. acnes strain ATCC 11828. In some embodiments, Cas5 is encoded by a sequence as set forth in SEQ ID NO: 8. In some embodiments, Cas5 is encoded by a sequence that is at least about 70%, 80%, 85%, 90%, 91%, 92%, 93%, 94%, 95%, 96%, 97%, 98%, 99%, or 100% homologous to SEQ ID NO: 8. In some embodiments, Cas5 is encoded by a sequence that is about 70%, 80%, 85%, 90%, 91%, 92%, 93%, 94%, 95%, 96%, 97%, 98%, 99%, or 100% sequence identity to SEQ ID NO: 8. In some embodiments, Cas5 is encoded by a sequence that is about 95% homologous to SEQ ID NO: 8. In some embodiments, Cas5 is encoded by a sequence that is about 97% homologous to SEQ ID NO: 8. In some embodiments, Cas5 is encoded by a sequence that is about 99% homologous to SEQ ID NO: 8. In some embodiments, Cas5 is encoded by a sequence that is about 100% homologous to SEQ ID NO: 8.

[0114] In some instances, the at least one strain of bacteria comprises a nucleic acid encoding Cas5, wherein the nucleic acid comprises at least about 10, at least about 20, at least about 30, at least about 40, at least about 50, at least about 60, at least about 70, at least about 80, at least about 90, at least about 100, at least about 110, at least about 120, at least about 130, at least about 140, at least about 150, at least about 160, at least about 170, at least about 180, at least about 190, at least about 200, at least about 210, at least about 220, at least about 230, at least about 240, at least about 250, at least about 260, at least about 270, at least about 280, at least about 290, at least about 300, at least about 310, at least about 320, at least about 330, at least about 340, at least about 350, at least about 360, at least about 370, at least about 380, at least about 390, at least about 400, at least about 410, at least about 420, at least about 430, at least about 440, at least about 450, at least about 460, at least about 470, at least about 480, at least about 490, at least about 500, at least about 550, at least about 650, at least about 700, or more than about 700 consecutive bases of SEQ ID NO: 8. In some instances, the at least one strain of bacteria comprises a nucleic acid encoding Cas5, wherein the nucleic acid comprises about 10, about 20, about 30, about 40, about 50, about 60, about 70, about 80, about 90, about 100, about 110, about 120, about 130, about 140, about 150, about 160 about 170, about 180, about 190, about 200, about 210, about 220, about 230, about 240, about 250, about 260, about 270, about 280, about 290, about 300, about 310, about 320, about 330, about 340, about 350, about 360, about 370, about 380, about 390, about 400, about 410, about 420, about 430, about 440, about 450, about 460, about 470, about 480, about 490, about 500, about 550, about 650, about 700, or more than about 700 consecutive bases of SEQ ID NO: 8.

### ABC Transporter

[0115] In some embodiments, compositions disclosed herein comprise at least one strain of bacteria, wherein the at least one strain of bacteria comprises an ATP-binding cassette transporter. In certain embodiments, the at least one strain of bacteria comprises a nucleic acid encoding an ATP-binding cassette transporter (ABC transporter). In certain embodiments, the at least one strain of bacteria is selected for expression or overexpression of a nucleic acid encoding an ABC transporter. In certain embodiments, the at least one strain of bacteria is selected for increased activity of an ABC transporter. In certain embodiments, the at least one strain of bacteria is selected for the presence of a nucleic acid encoding an ABC transporter. In certain embodiments, the at least one strain of bacteria is transformed for overexpression of a nucleic acid encoding an ABC transporter. In certain embodiments, the at least one strain of bacteria is transformed for increased activity of an ABC transporter. In certain embodiments, the at least one strain of bacteria is transformed for the presence of a nucleic acid encoding an ABC transporter. In certain embodiments, the at least one strain of bacteria is engineered for overexpression of a nucleic acid encoding an ABC transporter. In certain embodiments, the at least one strain of bacteria is engineered for increased activity of an ABC transporter. In certain embodiments, the at least one strain of bacteria is engineered for the presence of a nucleic acid encoding an ABC transporter. In some embodiments, the ABC transporter is a portion of a known ABC transporter. In some embodiments, the ABC transporter is a portion of a known ABC transporter, wherein the portion of the known ABC transporter can perform an activity of the known ABC transporter. In some embodiments, the ABC transporter is a portion of a known ABC transporter, wherein the portion of the known ABC transporter can perform an enzymatic activity of the known ABC transporter. In some embodiments, the ABC transporter is a portion of a known ABC transporter, wherein the portion of the known ABC transporter can perform a transport activity of the known ABC transporter.

[0116] In certain embodiments, the at least one strain has at least about 1.5-fold greater expression or activity of ABC transporter compared to a reference strain (e.g., pathogenic strain, not a health-associated strain). In certain embodiments, the at least one strain has at least about 2-fold greater expression or activity of ABC transporter compared to the reference strain. In certain embodiments, the at least one strain has at least about 3-fold greater expression or activity of ABC transporter compared to the reference strain. In certain embodiments, the at least one strain has at least about 5-fold greater expression or activity of ABC transporter compared to the reference strain. In certain embodiments, the at least one strain has at least about 10-fold greater expression or activity of ABC transporter compared to the reference strain.

[0117] In some embodiments, ABC transporters disclosed herein are encoded by a sequence of SEQ ID NO.: 6 or a sequence that is homologous to SEQ ID NO.: 6. In some embodiments, the ABC transporter is encoded by a sequence that is at least about 80% homologous to SEQ ID NO: 6. In some embodiments, the ABC transporter is encoded by a sequence that is at least about 90% homologous to SEQ ID NO: 6. In some embodiments, the ABC transporter is encoded by a sequence that is at least about 95% homologous to SEQ ID NO: 6. In some embodiments, the ABC transporter is encoded by a sequence that is at least about 96% homologous to SEQ ID NO: 6. In some embodiments, the ABC transporter is encoded by a sequence that is at least about 97% homologous to SEQ ID NO: 6. In some embodiments, the ABC transporter is encoded by a sequence that is at least about 98% homologous to SEQ ID NO: 6. In some embodiments, the ABC transporter is encoded by a sequence that is at least about 99% homologous to SEQ ID NO: 6. In some embodiments, the ABC transporter is encoded by a sequence that is 100% homologous to SEQ ID NO: 6. In certain embodiments, the at least one strain is (completely or partially) selected, transformed, or engineered with a nucleic acid that is at least about 80%, 90%, 95%, 98%, 99%, or 100% homology to SEQ ID NO: 6 is partially or completely present in the at least one strain.

### DNA Binding Response Regulator

[0118] In some embodiments, compositions disclosed herein comprise at least one strain of bacteria, wherein the at least one strain of bacteria does not comprise a DNA binding response regulator. In certain embodiments, the at least one strain does not comprise a nucleic acid encoding a DNA binding response regulator. In certain embodiments, the at least one strain has been selected for reduced expression or activity of a DNA binding response regulator. In certain embodiments, the at least one strain has been selected for an absence of a DNA binding response regulator. In certain embodiments, bacteria disclosed herein have been transformed for reduced expression or activity of a DNA binding response regulator. In certain embodiments, bacteria disclosed herein have been transformed for an absence of a DNA binding response regulator. In certain embodiments, bacteria disclosed herein have been engineered for reduced expression or activity of a DNA binding response regulator. In certain embodiments, bacteria disclosed herein have been engineered for an absence of a DNA binding response regulator.

[0119] In certain embodiments, the at least one strain of bacteria has at least about 1.5-fold less expression or activity of a DNA binding response regulator relative to a reference strain (e.g., pathogenic strain, not a health-associated strain). In certain embodiments, the at least one strain has at least about 2-fold less expression or activity of a DNA binding response regulator relative to the reference strain. In certain embodiments, the at least one strain has at least about 3-fold less expression or activity of a DNA binding response regulator relative to the reference strain. In certain embodiments, the at least one strain has at least about 5-fold less expression or activity of a DNA binding response regulator relative to the reference strain. In certain embodiments, the at least one strain has at least about 10-fold less expression or activity of a DNA binding response regulator relative to the reference strain.

[0120] In certain embodiments, the at least one strain has been selected, transformed, or engineered to remove a nucleic acid with at least 90% homology to SEQ ID NO: 7. In certain embodiments, the at least one strain has been selected, transformed, or engineered to express a nucleic acid with at least 90% homology to SEQ ID NO: 7 at a lower level relative to the reference strain. In certain embodiments, the at least one strain has been selected, transformed, or engineered to remove a nucleic acid with at least 95% homology to SEQ ID NO: 7. In certain embodiments, the at least one strain has been selected, transformed, or engineered to express a nucleic acid with at least 95% homology to SEQ ID NO: 7 at a lower level relative to the reference strain. In certain embodiments, the at least one strain has been selected, transformed, or engineered to remove a nucleic acid with at least 97% homology to SEQ ID NO: 7. In certain embodiments, the at least one strain has been selected, transformed, or engineered to express a nucleic acid with at least 97% homology to SEQ ID NO: 7 at a lower level relative to the reference strain. In certain embodiments, the at least one strain has been selected, transformed, or engineered to remove a nucleic acid with at least 99% homology to SEQ ID NO: 7. In certain embodiments, the at least one strain has been selected, transformed, or engineered to express a nucleic acid with at least 99% homology to SEQ ID NO: 7 at a lower level relative to the reference strain. In certain embodiments, the at least one strain has been selected, transformed, or engineered to remove a nucleic acid with 100% homology to SEQ ID NO: 7. In certain embodiments, the at least one strain has been selected, transformed, or engineered to express a nucleic acid with 100% homology to SEQ ID NO: 7 at a lower level relative to the reference strain.

[0121] In certain embodiments, the at least one strain comprises a nucleic acid that is disrupted by an insertion of one or more nucleotides or a introduction of a frameshift mutation, wherein the nucleic acid has 80%, 90%, 95%, 98%, 99%, or 100% homology to SEQ ID NO: 7, before being disrupted. For example, in certain embodiments, a nucleic acid with at least 80%, 90%, 95%, 98%, 99%, or 100% homology to SEQ ID NO: 7 is deleted by at least about 5%, at least about 10%, at least about 15%, at least about 20%, at least about 25%, at least about 30%, at least about 35%, at least about 40%, at least about 45%, at least about 50%, at least about 55%, at least about 60%, at least about 65%, at least about 70%, at least about 75%, at least about 80%, at least about 85%, at least about 90%, at least about 95% or more from the 3 prime end of the nucleic acid. In certain embodiments, the nucleic acid with at least 80%, 90%, 95%, 98%, 99%, or 100% homology to SEQ ID NO: 7 is deleted by at least about 5%, at least about 10%, at least about 15%, at least about 20%, at least about 25%, at least about 30%, at least about 35%, at least about 40%, at least about 45%, at least about 50%, at least about 55%, at least about 60%, at least about 65%, at least about 70%, at least about 75%, at least about 80%, at least about 85%, at least about 90%, at least about 95% or more from the 5 prime end of the nucleic acid.

### Phosphoglycerate Kinase

[0122] In some embodiments, compositions disclosed herein comprise at least one strain of bacteria, wherein the at least one strain of bacteria does not comprise a phosphoglycerate kinase. In certain embodiments, the at least one strain does not comprise a nucleic acid encoding a phosphoglycerate kinase. In certain embodiments, the at least one strain has been selected for reduced expression or activity of a phosphoglycerate kinase. In certain embodiments, the at least one strain has been selected for an absence of a phosphoglycerate kinase. In certain embodiments, bacteria disclosed herein have been transformed for reduced expression or activity of a phosphoglycerate kinase. In certain embodiments, bacteria disclosed herein have been transformed for an absence of a phosphoglycerate kinase. In certain embodiments, bacteria disclosed herein have been engineered for reduced expression or activity of a phosphoglycerate kinase. In certain embodiments, bacteria disclosed herein have been engineered for an absence of a phosphoglycerate kinase.

[0123] In certain embodiments, the at least one strain of bacteria has at least about 1.5-fold less expression or activity of a phosphoglycerate kinase relative to a reference strain (e.g., pathogenic strain, not a health-associated strain). In certain embodiments, the at least one strain has at least about 2-fold less expression or activity of a phosphoglycerate kinase relative to the reference strain. In certain embodiments, the at least one strain has at least about 3-fold less expression or activity of a phosphoglycerate kinase relative to the reference strain. In certain embodiments, the at least one strain has at least about 5-fold less expression or activity of a phosphoglycerate kinase relative to the reference strain. In certain embodiments, the at least one strain has at least about 10-fold less expression or activity of a phosphoglycerate kinase relative to the reference strain.

[0124] In certain embodiments, the at least one strain has been selected, transformed, or engineered to remove a nucleic acid with at least 90% homology to SEQ ID NO: 9. In certain embodiments, the at least one strain has been selected, transformed, or engineered to express a nucleic acid with at least 90% homology to SEQ ID NO: 9 at a lower level relative to the reference strain. In certain embodiments, the at least one strain has been selected, transformed, or engineered to remove a nucleic acid with at least 95% homology to SEQ ID NO: 9. In certain embodiments, the at least one strain has been selected, transformed, or engineered to express a nucleic acid with at least 95% homology to SEQ ID NO: 9 at a lower level relative to the reference strain. In certain embodiments, the at least one strain has been selected, transformed, or engineered to remove a nucleic acid with at least 97% homology to SEQ ID NO: 9. In certain embodiments, the at least one strain has been selected, transformed, or engineered to express a nucleic acid with at least 97% homology to SEQ ID NO: 9 at a lower level relative to the reference strain. In certain embodiments, the at least one strain has been selected, transformed, or engineered to remove a nucleic acid with at least 99% homology to SEQ ID NO: 9. In certain embodiments, the at least one strain has been selected, transformed, or engineered to express a nucleic acid with at least 99% homology to SEQ ID NO: 9 at a lower level relative to the reference strain. In certain embodiments, the at least one strain has been selected, transformed, or engineered to remove a nucleic acid with 100% homology to SEQ ID NO: 9. In certain embodiments, the at least one strain has been selected, transformed, or engineered to express a nucleic acid with 100% homology to SEQ ID NO: 9 at a lower level relative to the reference strain.

[0125] In certain embodiments, the at least one strain comprises a nucleic acid that is disrupted by an insertion of one or more nucleotides or a introduction of a frameshift mutation, wherein the nucleic acid has 80%, 90%, 95%, 98%, 99%, or 100% homology to SEQ ID NO: 9, before being disrupted. For example, in certain embodiments, a nucleic acid with at least 80%, 90%, 95%, 98%, 99%, or 100% homology to SEQ ID NO: 9 is deleted by at least about 5%, at least about 10%, at least about 15%, at least about 20%, at least about 25%, at least about 30%, at least about 35%, at least about 40%, at least about 45%, at least about 50%, at least about 55%, at least about 60%, at least about 65%, at least about 70%, at least about 75%, at least about 80%, at least about 85%, at least about 90%, at least about 95% or more from the 3 prime end of the nucleic acid. In certain embodiments, the nucleic acid with at least 80%, 90%, 95%, 98%, 99%, or 100% homology to SEQ ID NO: 9 is deleted by at least about 5%, at least about 10%, at least about 15%, at least about 20%, at least about 25%, at least about 30%, at least about 35%, at least about 40%, at least about 45%, at least about 50%, at least about 55%, at least about 60%, at least about 65%, at least about 70%, at least about 75%, at least about 80%, at least about 85%, at least about 90%, at least about 95% or more from the 5 prime end of the nucleic acid.

### Dermatin-Sulfate Adhesin

[0126] In some embodiments, compositions disclosed herein comprise at least one strain of bacteria, wherein the at least one strain of bacteria does not comprise a dermatin-sulfate adhesin (DSA1 and DSA2). In certain embodiments, the at least one strain does not comprise a nucleic acid encoding a dermatin-sulfate adhesin. In certain embodiments, the at least one strain has been selected for reduced expression or activity of a dermatin-sulfate adhesin. In certain embodiments, the at least one strain has been selected for an absence of a dermatin-sulfate adhesin. In certain embodiments, bacteria disclosed herein have been transformed for reduced expression or activity of a dermatin-sulfate adhesin. In certain embodiments, bacteria disclosed herein have been transformed for an absence of a dermatin-sulfate adhesin. In certain embodiments, bacteria disclosed herein have been engineered for reduced expression or activity of a dermatin-sulfate adhesin. In certain embodiments, bacteria disclosed herein have been engineered for an absence of a dermatin-sulfate adhesin.

[0127] In certain embodiments, the bacteria have been selected, transformed, or engineered for lower expression or activity or deletion of a dermatin-sulfate adhesin. In certain embodiments, the selected, transformed, or engineered bacteria has 1.5-fold, 2-fold, 3-fold, or 10-fold less expression or activity of the DSA 1 or DSA 2 compared to a reference strain. In certain embodiments, DSA1 or DSA2 is partially or completely deleted from the genome of the selected, transformed, or engineered, or engineered bacteria. In certain embodiments, DSA1 or DSA2 is disrupted by an insertion of one or more nucleotides or an introduction of a frameshift mutation in the genome of the selected, transformed, or engineered, or engineered bacteria.

### Hyaluronidase

[0128] In some embodiments, compositions disclosed herein comprise at least one strain of bacteria, wherein the at least one strain of bacteria does not comprise a hyaluronidase. Hyaluronidase is also known as hyaluronate lyase (locus tag PPA_RS01930). In some embodiments, compositions disclosed herein comprise at least one strain of bacteria, wherein the at least one strain of bacteria does not have hyaluronidase activity. In some embodiments, compositions disclosed herein comprise at least one strain of bacteria, wherein the at least one strain of bacteria does not comprise a nucleic acid encoding a hyaluronidase. In certain embodiments, the bacteria have been selected, transformed, or engineered for lower expression or activity of hyaluronidase relative to the bacteria before selecting, transforming or engineering, respectively.

[0129] In some embodiments, compositions disclosed herein comprise at least one strain of bacteria, wherein the at least one strain of bacteria comprises a hyaluronidase. In some embodiments, compositions disclosed herein comprise at least one strain of bacteria, wherein the at least one strain of bacteria has hyaluronidase activity. In some embodiments, compositions disclosed herein comprise at least one strain of bacteria, wherein the at least one strain of bacteria has a nucleic acid encoding a hyaluronidase. In certain embodiments, the bacteria have been selected, transformed, or engineered for greater expression or activity of hyaluronidase relative to the bacteria before selecting, transforming or engineering, respectively.

[0130] In certain embodiments, the selected, transformed, or engineered bacteria have 1.5-fold greater or lower expression or activity of hyaluronate lyase compared to a non-selected, transformed, or engineered strain. In certain embodiments, the selected, transformed, or engineered bacteria have 2-fold greater or lower expression or activity of hyaluronate lyase compared to a non-selected, transformed, or engineered strain. In certain embodiments, the selected, transformed, or engineered bacteria have 3-fold greater or lower expression or activity of hyaluronate lyase compared to a non-selected, transformed, or engineered strain. In certain embodiments, the selected, transformed, or engineered bacteria have 5-fold greater or lower expression or activity of hyaluronate lyase compared to a non-selected, transformed, or engineered strain. In certain embodiments, the selected, transformed, or engineered bacteria have 10-fold greater or lower expression or activity of hyaluronate lyase compared to a non-selected, transformed, or engineered strain. In certain embodiments, the bacteria have been selected, transformed, or engineered to acquire or express at a greater level, a nucleic acid with at least 90% homology to SEQ ID NO: 4. In certain embodiments, the bacteria have been selected, transformed, or engineered to acquire or express at a greater level, a nucleic acid with at least 95% homology to SEQ ID NO: 4. In certain embodiments, the bacteria have been selected, transformed, or engineered to acquire or express at a greater level, a nucleic acid with at least 97% homology to SEQ ID NO: 4. In certain embodiments, the bacteria have been selected, transformed, or engineered to acquire or express at higher level, a nucleic acid with at least 97% homology to SEQ ID NO: 4. In certain embodiments, the bacteria have been selected, transformed, or engineered to acquire or express at a higher level, a nucleic acid with at least 99% homology to SEQ ID NO: 4. In certain embodiments, the bacteria have been selected, transformed, or engineered to acquire or express at a higher level, a nucleic acid with 100% homology to SEQ ID NO: 4. In certain embodiments, the bacteria is a P. acnes bacteria. In certain embodiments, a gene with at least 80%, 90%, 95%, 98%, 99%, or 100% homology to SEQ ID NO: 4 is partially or completely deleted from the genome of the synthetic bacteria. In certain embodiments, a gene with at least 80%, 90%, 95%, 98%, 99%, or 100% homology to SEQ ID NO: 4 is disrupted by an insertion of one or more nucleotides or a introduction of a frameshift mutation in the genome of the selected, transformed, or engineered, or engineered bacteria. In certain embodiments, the selected, transformed, or engineered or selected bacteria are deoR+, Type II lipase positive, pIMPLE negative, or CRISPR Cas5 positive. In certain embodiments, the selected, transformed, or engineered or selected bacteria comprise P. acnes of ribotype RT1 and/or RT2.

[0131] In certain embodiments, the bacteria have been selected, transformed, or engineered for lesser expression or absence of hyaluronate lyase. In certain embodiments, the bacteria are selected, transformed, or engineered, or engineered to acquire the presence of a hyaluronidase gene. Hyaluronidase is also known as hyaluronate lyase (locus tag PPA_RS01930). In certain embodiments, the selected, transformed, or engineered, or engineered bacteria have 1.5-fold greater or lower expression or activity of hyaluronate lyase compared to a non-selected, transformed, or engineered strain. In certain embodiments, the selected, transformed, or engineered bacteria have 2-fold greater or lower expression or activity of hyaluronate lyase compared to a non-selected, transformed, or engineered strain. In certain embodiments, the selected, transformed, or engineered bacteria have 3-fold greater or lower expression or activity of hyaluronate lyase compared to a non-selected, transformed, or engineered strain. In certain embodiments, the selected, transformed, or engineered bacteria have 5-fold greater or lower expression or activity of hyaluronate lyase compared to a non-selected, transformed, or engineered strain. In certain embodiments, the selected, transformed, or engineered bacteria have 10-fold greater or lower expression or activity of hyaluronate lyase compared to a non-selected, transformed, or engineered strain. In certain embodiments, the bacteria have been selected, transformed, or engineered to acquire or express at a greater level, a nucleic acid with at least 90% homology to SEQ ID NO: 4. In certain embodiments, the bacteria have been selected, transformed, or engineered to acquire or express at a greater level, a nucleic acid with at least 95% homology to SEQ ID NO: 4. In certain embodiments, the bacteria have been selected, transformed, or engineered to acquire or express at a greater level, a nucleic acid with at least 97% homology to SEQ ID NO: 4. In certain embodiments, the bacteria have been selected, transformed, or engineered to acquire or express at higher level, a nucleic acid with at least 97% homology to SEQ ID NO: 4. In certain embodiments, the bacteria have been selected, transformed, or engineered to acquire or express at a higher level, a nucleic acid with at least 99% homology to SEQ ID NO: 4. In certain embodiments, the bacteria have been selected, transformed, or engineered to acquire or express at a higher level, a nucleic acid with 100% homology to SEQ ID NO: 4. In certain embodiments, the bacteria is a P. acnes bacteria. In certain embodiments, a nucleic acid with at least 80%, 90%, 95%, 98%, 99%, or 100% homology to SEQ ID NO: 4 is partially or completely deleted from the genome of the synthetic bacteria. In certain embodiments, a nucleic acid with at least 80%, 90%, 95%, 98%, 99%, or 100% homology to SEQ ID NO: 4 is disrupted by an insertion of one or more nucleotides or a introduction of a frameshift mutation in the genome of the selected, transformed, or engineered, or engineered bacteria. In certain embodiments, the selected, transformed, or engineered or selected bacteria are deoR+, Type II lipase positive, pIMPLE negative, or CRISPR Cas5 positive. In certain embodiments, the selected, transformed, or engineered or selected bacteria comprise P. acnes of ribotype RT1 and/or RT2.

### Alanine Dehydrogenase

[0132] In some embodiments, compositions disclosed herein comprise at least one strain of bacteria, wherein the at least one strain of bacteria does not comprise an alanine dehydrogenase. In some embodiments, compositions disclosed herein comprise at least one strain of bacteria, wherein the at least one strain of bacteria does not have alanine dehydrogenase activity. In some embodiments, compositions disclosed herein comprise at least one strain of bacteria, wherein the at least one strain of bacteria does not comprise a nucleic acid encoding an alanine dehydrogenase. In certain embodiments, the bacteria have been selected, transformed, or engineered for lower expression or activity of alanine dehydrogenase relative to the bacteria before selection, transformation or engineering, respectively.

[0133] In certain embodiments, bacteria are selected, transformed, or engineered for the absence or deletion of a nucleic acid encoding alanine dehydrogenase or a portion thereof. In some embodiments, the alanine dehydrogenase is encoded by a sequence of SEQ ID NO: 5. In some embodiments, the alanine dehydrogenase is encoded by a sequence that is at least 80% homology to SEQ ID NO: 5. In certain embodiments, the bacteria are selected, transformed, or engineered for the absence or deletion of an alanine dehydrogenase or a portion thereof with at least 90% homology to SEQ ID NO: 5. In certain embodiments, the bacteria are selected, transformed, or engineered for the absence or deletion of an alanine dehydrogenase or a portion thereof with at least 95% homology to SEQ ID NO: 5. In certain embodiments, the bacteria are selected, transformed, or engineered for the absence or deletion of an alanine dehydrogenase or a portion thereof with at least 97% homology to SEQ ID NO: 5. In certain embodiments, the bacteria are selected, transformed, or engineered for the absence or deletion of an alanine dehydrogenase or a portion thereof with at least 98% homology to SEQ ID NO: 5. In certain embodiments, the bacteria are selected, transformed, or engineered for the absence or deletion of an alanine dehydrogenase or a portion thereof with at least 99% homology to SEQ ID NO: 5. In certain embodiments, a nucleic acid with at least 80%, 90%, 95%, 98%, 99%, or 100% homology to SEQ ID NO: 5 is partially or completely deleted from the selected, transformed, or engineered, or engineered bacteria. In certain embodiments, a nucleic acid with at least 80%, 90%, 95%, 98%, 99%, or 100% homology to SEQ ID NO: 5 is disrupted by an insertion of one or more nucleotides or a introduction of a frameshift mutation in the selected, transformed, or engineered bacteria. In certain embodiments, the nucleic acid is deleted by at least about 5%, at least about 10%, at least about 15%, at least about 20%, at least about 25%, at least about 30%, at least about 35%, at least about 40%, at least about 45%, at least about 50%, at least about 55%, at least about 60%, at least about 65%, at least about 70%, at least about 75%, at least about 80%, at least about 85%, at least about 90%, at least about 95% or more from the 3 prime end of the nucleic acid. In certain embodiments, the nucleic acid is deleted by at least about 5%, at least about 10%, at least about 15%, at least about 20%, at least about 25%, at least about 30%, at least about 35%, at least about 40%, at least about 45%, at least about 50%, at least about 55%, at least about 60%, at least about 65%, at least about 70%, at least about 75%, at least about 80%, at least about 85%, at least about 90%, at least about 95% or more from the 5 prime end of the nucleic acid.

### Transposase 2

[0134] In some embodiments, compositions disclosed herein comprise at least one strain of bacteria, wherein the at least one strain of bacteria does not comprise a transposase 2. In some embodiments, compositions disclosed herein comprise at least one strain of bacteria, wherein the at least one strain of bacteria does not have transposase 2 activity. In some embodiments, compositions disclosed herein comprise at least one strain of bacteria, wherein the at least one strain of bacteria does not comprise a nucleic acid encoding a transposase 2. In certain embodiments, the bacteria have been selected, transformed, or engineered for lower expression or activity of transposase 2 relative to the bacteria before selection, transformation or engineering, respectively. In some embodiments, compositions disclosed herein comprise at least one strain of bacteria, wherein the at least one strain of bacteria does not have transposase 2 activity, expresses deoR and is of ribotype RT1.

[0135] In certain embodiments, bacteria are selected, transformed, or engineered for the absence or deletion of a nucleic acid encoding transposase 2 or a portion thereof. In some embodiments, the transposase 2 is encoded by a sequence of SEQ ID NO: 48. In some embodiments, the transposase 2 is encoded by a sequence that is at least 80% homology to SEQ ID NO: 48. In certain embodiments, the bacteria are selected, transformed, or engineered for the absence or deletion of a transposase 2 or a portion thereof with at least 90% homology to SEQ ID NO: 48. In certain embodiments, the bacteria are selected, transformed, or engineered for the absence or deletion of a transposase 2 or a portion thereof with at least 95% homology to SEQ ID NO: 48. In certain embodiments, the bacteria are selected, transformed, or engineered for the absence or deletion of a transposase 2 or a portion thereof with at least 97% homology to SEQ ID NO: 48. In certain embodiments, the bacteria are selected, transformed, or engineered for the absence or deletion of a transposase 2 or a portion thereof with at least 98% homology to SEQ ID NO: 48. In certain embodiments, the bacteria are selected, transformed, or engineered for the absence or deletion of a transposase 2 or a portion thereof with at least 99% homology to SEQ ID NO: 48. In certain embodiments, a nucleic acid with at least 80%, 90%, 95%, 98%, 99%, or 100% homology to SEQ ID NO: 48 is partially or completely deleted from the selected, transformed, or engineered, or engineered bacteria. In certain embodiments, a nucleic acid with at least 80%, 90%, 95%, 98%, 99%, or 100% homology to SEQ ID NO: 48 is disrupted by an insertion of one or more nucleotides or a introduction of a frameshift mutation in the selected, transformed, or engineered bacteria. In certain embodiments, the nucleic acid is deleted by at least about 5%, at least about 10%, at least about 15%, at least about 20%, at least about 25%, at least about 30%, at least about 35%, at least about 40%, at least about 45%, at least about 50%, at least about 55%, at least about 60%, at least about 65%, at least about 70%, at least about 75%, at least about 80%, at least about 85%, at least about 90%, at least about 95% or more from the 3 prime end of the nucleic acid. In certain embodiments, the nucleic acid is deleted by at least about 5%, at least about 10%, at least about 15%, at least about 20%, at least about 25%, at least about 30%, at least about 35%, at least about 40%, at least about 45%, at least about 50%, at least about 55%, at least about 60%, at least about 65%, at least about 70%, at least about 75%, at least about 80%, at least about 85%, at least about 90%, at least about 95% or more from the 5 prime end of the nucleic acid.

### Additional Markers

[0136] In some embodiments, compositions disclosed herein comprise at least one strain of bacteria, wherein the at least one strain of bacteria comprises at least one protein selected from a protein that mediates biosynthesis of a polysaccharide, a protein that mediates biosynthesis of cell wall, a protein that mediates biosynthesis of amino acids, a protein that mediates carbohydrate metabolism, and a protein that mediates glycerol transportation. In some embodiments, compositions disclosed herein comprise at least one strain of bacteria, wherein the at least one strain of bacteria comprises at least one nucleic acid that encodes a protein, wherein the protein mediates biosynthesis of a polysaccharide, a protein that mediates biosynthesis of cell wall, a protein that mediates biosynthesis of amino acids, a protein that mediates carbohydrate metabolism, and a protein that mediates glycerol transportation. In some embodiments, the protein that mediates biosynthesis of a polysaccharide is a glycosyl transferase. In some embodiments, the protein that mediates biosynthesis of cell-wall is a D-alanin-D-alanine ligase. In some embodiments, the protein that mediates amino acid biosynthesis is a cobalamin-independent methionine synthase. In some embodiments, the protein is a glycerol uptake facilitator protein. In some embodiments, the protein is a protoporphyrinogen oxidase. In some embodiments, the protoporphyrinogen oxidase is encoded by a hemY gene.

[0137] In some embodiments, compositions disclosed herein comprise at least one strain of bacteria, wherein the at least one strain of bacteria comprises at least one nucleic acid encoding a protein that is selected from a glycosyl transferase, a D-alanin-D-alanine ligase, and a cobalamin-independent methionine synthase.

[0138] In certain embodiments, the bacteria have been selected, transformed, or engineered for greater expression or activity of a protein, wherein the protein is selected from a protein that mediates biosynthesis of a polysaccharide, a protein that mediates biosynthesis of cell wall, and a protein that mediates biosynthesis of amino acids. In certain embodiments, the bacteria have been selected, transformed, or engineered for greater expression or activity of a protein selected from a glycosyl transferase, a D-alanin-D-alanine ligase, and a cobalamin-independent methionine synthase.

[0139] In some embodiments, compositions disclosed herein comprise at least one strain of bacteria, wherein the at least one strain of bacteria does not comprise a Christie-Atkins-Munch-Petersen (CAMP) protein. In some embodiments, compositions disclosed herein comprise at least one strain of bacteria, wherein the at least one strain of bacteria does not comprise a CAMP1 protein. In some embodiments, compositions disclosed herein comprise at least one strain of bacteria, wherein the at least one strain of bacteria does not comprise a CAMP2 protein. In some embodiments, compositions disclosed herein comprise at least one strain of bacteria, wherein the at least one strain of bacteria does not comprise a CAMP3 protein.

[0140] In some embodiments, compositions disclosed herein comprise at least one strain of bacteria, wherein the at least one strain of bacteria does not comprise a nucleic acid encoding a CAMP protein. In certain embodiments, the bacteria have been selected, transformed, or engineered for less expression or activity of a CAMP protein relative to the bacteria that is not selected, transformed or engineered. In certain embodiments, the bacteria have been selected, transformed, or engineered for no expression or activity of a CAMP protein. In certain embodiments, the bacteria have been mutated to remove at least a portion of a nucleic acid encoding a CAMP protein. In some embodiments, the CAMP protein is selected from CAMP1, CAMP2, and CAMP3.

[0141] In some embodiments, compositions disclosed herein comprise at least one strain of bacteria, wherein the at least one strain of bacteria does not comprise a sialidase. In some embodiments, compositions disclosed herein comprise at least one strain of bacteria, wherein the at least one strain of bacteria does not comprise a nucleic acid encoding a sialidase. In certain embodiments, the bacteria have been selected, transformed, or engineered for less expression or activity of a sialidase relative to the bacteria that is not selected, transformed or engineered. In certain embodiments, the bacteria have been selected, transformed, or engineered for no expression or activity of a sialidase. In certain embodiments, the bacteria have been mutated to remove at least a portion of a nucleic acid encoding a sialidase.

[0142] In some embodiments, compositions disclosed herein comprise at least one strain of bacteria, wherein the at least one strain of bacteria does not comprise a neuramidase. In some embodiments, compositions disclosed herein comprise at least one strain of bacteria, wherein the at least one strain of bacteria does not comprise a nucleic acid encoding a neuramidase. In certain embodiments, the bacteria have been selected, transformed, or engineered for less expression or activity of a neuramidase relative to the bacteria that is not selected, transformed or engineered. In certain embodiments, the bacteria have been selected, transformed, or engineered for no expression or activity of a neuramidase. In certain embodiments, the bacteria have been mutated to remove at least a portion of a nucleic acid encoding a neuramidase.

[0143] In certain embodiments, the bacteria has been selected, transformed, or engineered for higher activity or expression of any of the following proteins: Adhesion (NCBI Accession No. 50842581); CAMP factor (NCBI Accession No. 50842175, 50842711, 50842820, 50843546); Endoglycoceramidase (NCBI Accession No. 50842131); Iron transport lipoprotein (NCBI Accession No. 50841911); Lysozyme M1 (NCBI Accession No. 50843125); Protein PAGK_237 (NCBI Accession No. 482891444); Protein PPA0532 (NCBI Accession No. 50842016); Protein PPA0533 (NCBI Accession No. 50842017); or Protein PPA1498 (NCBI Accession No. 50842976). In certain embodiments, the bacteria has been selected, transformed, or engineered with a nucleic acid encoding any of the following protein any of the following proteins: Adhesion (NCBI Accession No. 50842581); CAMP factor (NCBI Accession No. 50842175, 50842711, 50842820, 50843546); Endoglycoceramidase (NCBI Accession No. 50842131); Iron transport lipoprotein (NCBI Accession No. 50841911); Lysozyme M1 (NCBI Accession No. 50843125); Protein PAGK_237 (NCBI Accession No. 482891444); Protein PPA0532 (NCBI Accession No. 50842016); Protein PPA0533 (NCBI Accession No. 50842017); or Protein PPA1498 (NCBI Accession No. 50842976).

[0144] In certain embodiments, the bacteria has been selected, transformed, or engineered for lower activity or expression of any of the following proteins: Adhesion (NCBI Accession No. 50843565 or 50843645); Cell wall hydrolase (NCBI Accession No. 50843410); Lipase/acylhydrolase (NCBI Accession No. 50843480); NPL/P60 protein (NCBI Accession No. 50842209); Peptide ABC transporter (NCBI Accession No. 50843590); Protein PPA1197 (NCBI Accession No. 50842677); Protein PPA1281 (NCBI Accession No. 50842762); Protein PPA1715 (NCBI Accession No. 50843175); Protein PPA1939 (NCBI Accession No. 50843388); Protein PPA2239 (NCBI Accession No. 50843674); Rare lipoprotein A rlpa (NCBI Accession No. 50843612); or Triacylglycerol lipase (NCBI Accession No. 50843543). In certain embodiments, the bacteria has been selected, transformed, or engineered with a nucleotide to delete or disrupt a gene encoding any of the following proteins: Adhesion (NCBI Accession No. 50843565 or 50843645); Cell wall hydrolase (NCBI Accession No. 50843410); Lipase/acylhydrolase (NCBI Accession No. 50843480); NPL/P60 protein (NCBI Accession No. 50842209); Peptide ABC transporter (NCBI Accession No. 50843590); Protein PPA1197 (NCBI Accession No. 50842677); Protein PPA1281 (NCBI Accession No. 50842762); Protein PPA1715 (NCBI Accession No. 50843175); Protein PPA1939 (NCBI Accession No. 50843388); Protein PPA2239 (NCBI Accession No. 50843674); Rare lipoprotein A rlpa (NCBI Accession No. 50843612); or Triacylglycerol lipase (NCBI Accession No. 50843543).

[0145] In certain embodiments, bacteria disclosed herein have been selected, transformed, or engineered for lower activity or expression of any of the following proteins: HMPREF0675_4855; HMPREF0675_4856; HMPREF0675_4479; HMPREF0675_4480; HMPREF0675_4481; HMPREF0675_3655/3657; HMPREF0675_4816; HMPREF0675_4817; HMPREF0675_5205; HMPREF0675_5206; HMPREF0675_5014; HMPREF0675_5101; HMPREF0675_5159; HMPREF0675_4093/4094; HMPREF0675_4163; HMPREF0675_5031; HMPREF0675_5390; HMPREF0675_3037. In certain embodiments, the bacteria have been selected, transformed, or engineered with a nucleotide to delete or disrupt a gene encoding any of the following proteins: HMPREF0675_4855; HMPREF0675_4856; HMPREF0675_4479; HMPREF0675_4480; HMPREF0675_4481; HMPREF0675_3655/3657; HMPREF0675_4816; HMPREF0675_4817; HMPREF0675_5205; HMPREF0675_5206; HMPREF0675_5014; HMPREF0675_5101; HMPREF0675_5159; HMPREF0675_4093/4094; HMPREF0675_4163; HMPREF0675_5031; HMPREF0675_5390; HMPREF0675_3037.

[0146] In certain embodiments, the bacteria have been selected, transformed, or engineered for higher activity or expression of any of the following proteins HMPREF0675_4855; HMPREF0675_4856; HMPREF0675_4479; HMPREF0675_4480; HMPREF0675_4481; HMPREF0675_3655/3657; HMPREF0675_4816; HMPREF0675_4817; HMPREF0675_5205; HMPREF0675_5206; HMPREF0675_5014; HMPREF0675_5101; HMPREF0675_5159; HMPREF0675_4093/4094; HMPREF0675_4163; HMPREF0675_5031; HMPREF0675_5390; HMPREF0675_3037. In certain embodiments, the bacteria has been selected, transformed, or engineered with a nucleic acid encoding any of the following proteins: HMPREF0675_4855; HMPREF0675_4856; HMPREF0675_4479; HMPREF0675_4480; HMPREF0675_4481; HMPREF0675_3655/3657; HMPREF0675_4816; HMPREF0675_4817; HMPREF0675_5205; HMPREF0675_5206; HMPREF0675_5014; HMPREF0675_5101; HMPREF0675_5159; HMPREF0675_4093/4094; HMPREF0675_4163; HMPREF0675_5031; HMPREF0675_5390; HMPREF0675_3037.

[0147] In certain embodiments, the selected, transformed, or engineered bacteria do not comprise an antibiotic resistance gene. In certain embodiments, the selected, transformed, or engineered bacteria lack an antibiotic resistance gene to any one or more of aminoglycoside, beta-lactam, colistin, fluoroquinolone, fosfomycin, fusidic acid, macrolide, lincosamide, streptogramin B, nitroimidazole, oxazolidinone, phenicol, rifampicin, sulphonamide, tetracycline, trimethoprim, or glycopeptide. In certain embodiments, an antibiotic can be applied to halt treatment with selected, transformed, or engineered bacteria disclosed herein. In certain embodiments, the antibiotic is aminoglycoside, beta-lactam, colistin, fluoroquinolone, fosfomycin, fusidic acid, macrolide, lincosamide, streptogramin B, nitroimidazole, oxazolidinone, phenicol, rifampicin, sulphonamide, tetracycline, trimethoprim, or glycopeptide.

[0148] In certain embodiments, the bacteria are selected, transformed, or engineered in order to reduce expression or release of pro-inflammatory mediators by human cells of which the bacteria contact. Bacteria may either directly or indirectly contact human cells (e.g., human skin cells). For instance, bacteria may indirectly contact human cells via factors secreted or released from the bacteria. Non-limiting example of pro-inflammatory mediators from human cells are IL-8, IL-1, IL-6, TNF-alpha, INF-alpha, and human beta defensin.

### Mixtures of Different Microbes

[0149] Provided herein are compositions of a plurality of health-associated microbes. The composition of health-associated microbes may be a mixture of a plurality of different health-associated microbes. In a certain embodiment, the mixture comprises at least one selected, transformed, or engineered bacteria. In a certain embodiment, the mixture comprises at least one selected, transformed, or engineered P. acnes. In certain embodiments, the mixture comprises 2, 3, 4, 5, 6, 7, 8, 9, 10 or more isolated and purified species, strains, ribotypes, or phylotypes of bacteria. In a certain embodiment, the mixture comprises at least one strain of bacteria that normally colonizes a tissue or body area other than the skin. In a certain embodiment, the mixture comprises at least one strain of bacteria that normally colonizes the oral cavity. In certain embodiments, the at least one bacteria that normally colonizes the oral cavity is S. salivarius. In a certain embodiment, the mixture comprises at least one strain of bacteria that normally colonizes the lumen of the gastrointestinal system. In a certain embodiment, the mixture comprises at least one bacteria that normally colonizes the lumen of the gastrointestinal system is a Lactobacillus or a Bifidobacterium. In certain embodiments, the Bifidobacterium is Bidiobacterium lactis Bb-12, Bifidobacterium animalis, Bifidobacterium breve, Bifidobacterium bifidum, or any combination thereof. In certain embodiments, the Lactobacillus is Lactobacillus acidophilus, Lactobacillus bulgaricus, Lactobacillus rhamnosus GG, Lactobacillus fermentumi, Lactobacillus sakei, Lactobacillus casei, Lactobacillus salivarius, L. rhamnosus LC705, Lactobacillus F19 L, Lactobacillus acidophilus La-5, or any combination thereof. In a certain embodiment, the mixture comprises at least 2, 3, 4, 5, 6, 7, 8, 9, 10, or more different bacterial species. In a certain embodiment, the mixture comprises a mixture of at least 2, 3, 4, 5, 6, 7, 8, 9, 10, or more different bacterial strains. In a certain embodiment, the mixture contains at least one non-bacterial microbe such as a fungus, virus, or bacteriophage. Any defined mixture of a plurality of probiotic strains may be recited to “consist essentially of” This means that the mixture includes only the specified strains plus any non-active ingredient necessary for proper administration as a topical or oral formulation, such as an excipient or diluent.

[0150] In some embodiments, compositions disclosed herein comprise health-associated-microbes and probiotics especially useful for treating eczema. In some embodiments, compositions for treating eczema disclosed herein comprise Staphylococcus Aureus. In some embodiments, compositions for treating eczema disclosed herein comprise dead Staphylococcus Aureus bacteria. In some embodiments, compositions for treating eczema disclosed herein comprise Staphylococcus hominis. In other embodiments, the probiotic comprises of one more of a Dermacoccus, Methlyobacterium or Propionibacterium as they have a negative correlation with S. aureus. In other embodiments, a topical probiotic composition of S. mitis, S. sanguinis or S. cristatus are included in the probiotic.

### Formulations

[0151] Provided herein, in some aspects, are compositions that comprise at least one probiotic or health-associated microbe disclosed herein, wherein the compositions are formulated for administration to a subject in need thereof. Generally, the subject is a human afflicted with acne, eczema, psoriasis, seborrheic dermatitis, rosacea, or any combination thereof. In some embodiments, a composition is formulated for topical administration to a subject in need thereof. In some embodiments, the compositions are formulated for topical administration to the skin of the subject. In some embodiments, the compositions are formulated for topical administration to the scalp of the subject. In some embodiments, a composition is formulated for oral administration. By way of non-limiting example, compositions disclosed herein comprising strains of Lactobacillus may be preferentially administered by oral administration. In some embodiments, a composition is formulated for transdermal administration. In some embodiments, a composition is formulated for injectable administration. In certain embodiments, the composition is a formulation selected from a gel, ointment, lotion, emulsion, paste, cream, foam, mousse, liquid, spray, suspension, dispersion and aerosol. In certain embodiments, the formulation comprises one or more excipients to provide a desired form and a desired viscosity, flow or other physical or chemical characteristic for effective application, coverage and adhesion to skin.

[0152] Compositions disclosed herein may be presented in a formulation that includes one or more excipients to improve any one or more of shelf-life, application, skin penetration, and therapeutic effect. In some embodiments, the excipient is necessary to improve any one or more of shelf-life, application, skin penetration, and therapeutic effect.

[0153] In certain embodiments, the health-associated microbe or probiotic compositions described herein are formulated for oral ingestion. The oral ingestion form may be a pill, tablet, capsule, paste, liquid suspension, colloid, or mixed with various foods such as candies, chews, yogurt, milk, cottage cheese or non-dairy based or lactose reduced substitutes. The formulation may contain additional non-active ingredients that improve flavor, smell, or texture of the edible composition. The formulation may also include binding agents, encapsulating films, or excipients that preserve shelf-life and bioavailability.

[0154] In certain embodiments, health-associated-microbes and probiotic compositions disclosed herein that are administered orally comprise a species of bacteria selected from L. acidophilus La-5, Bifidobacterium animalis, Lactobacillus rhamnosus, Lactobacillus F19, Lactobacillus fermentum, Lactobacillus Sakei, Lactobacillus reuteri, Bifidobacterium breve, Propionibacterium freudenreichii ssp. Shermanii JS, Bifidobacterium bifidum, Lactobacillus acidophilus, Lactobacillus casei, and Lactobacillus salivarius, and combinations thereof. In some embodiments, the composition comprises Lactobacillus salivarius and a fructo-oligosaccharide. In some embodiments, the composition comprises Lactobacillus rhamnosus GG. In some embodiments, the composition comprises Lactobacillus rhamnosus LC705. In some embodiments, the composition comprises Lactobacillus salivarius and a prebiotic. In some embodiments, the composition comprises hydrolyzed whey formula with Lactobacillus rhamnosus GG. In some embodiments, the composition comprises hydrolyzed whey formula with Bifidobacterium lactis Bb-12. In certain embodiments, health-associated-microbes and probiotic compositions disclosed herein that are administered orally comprise bacteria selected from Lactobacillus rhamnosus GG and bifidobacteria Bb-12, and a combination thereof.

[0155] An emulsion may be described as a preparation of one liquid distributed in small globules throughout the body of a second liquid. In some embodiments, the dispersed liquid is the discontinuous phase, and the dispersion medium is the continuous phase. When oil is the dispersed liquid and an aqueous solution is the continuous phase, it is known as an oil-in-water emulsion, whereas when water or aqueous solution is the dispersed phase and oil or oleaginous substance is the continuous phase, it is known as a water-in-oil emulsion. The oil phase may consist at least in part of a propellant, such as an HFA propellant. Either or both of the oil phase and the aqueous phase may contain one or more surfactants, emulsifiers, emulsion stabilizers, buffers, and other excipients. Preferred excipients include surfactants, especially non-ionic surfactants; emulsifying agents, especially emulsifying waxes; and liquid non-volatile non-aqueous materials, particularly glycols such as propylene glycol. The oil phase may contain other oily pharmaceutically approved excipients. For example, materials such as hydroxylated castor oil or sesame oil may be used in the oil phase as surfactants or emulsifiers.

[0156] A lotion may be described as a low- to medium-viscosity liquid formulation. A lotion can contain finely powdered substances that are in soluble in the dispersion medium through the use of suspending agents and dispersing agents. Alternatively, lotions can have as the dispersed phase liquid substances that are immiscible with the vehicle and are usually dispersed by means of emulsifying agents or other suitable stabilizers. In one embodiment, the lotion is in the form of an emulsion having a viscosity of between 100 and 1000 centistokes. The fluidity of lotions permits rapid and uniform application over a wide surface area. Lotions are typically intended to dry on the skin leaving a thin coat of their medicinal components on the skin's surface.

[0157] A cream may be described as a viscous liquid or semi-solid emulsion of either the “oil-in-water” or “water-in-oil type”. Creams may contain emulsifying agents and/or other stabilizing agents. In one embodiment, the formulation is in the form of a cream having a viscosity of greater than 1000 centistokes, typically in the range of 20,000-50,000 centistokes. Creams are often time preferred over ointments as they are generally easier to spread and easier to remove.

[0158] The basic difference between a cream and a lotion is the viscosity, which is dependent on the amount/use of various oils and the percentage of water used to prepare the formulations. Creams are typically thicker than lotions, may have various uses and often one uses more varied oils/butters, depending upon the desired effect upon the skin. In a cream formulation, the water-base percentage is about 60-75% and the oil-base is about 20-30% of the total, with the other percentages being the emulsifier agent, preservatives and additives for a total of 100%.

[0159] An ointment may be described as a semisolid preparation containing an ointment base and optionally one or more active agents of this disclosure. Examples of suitable ointment bases include hydrocarbon bases (e.g., petrolatum, white petrolatum, yellow ointment, and mineral oil); absorption bases (hydrophilic petrolatum, anhydrous lanolin, lanolin, and cold cream); water-removable bases (e.g., hydrophilic ointment), and water-soluble bases (e.g., polyethylene glycol ointments). Pastes typically differ from ointments in that they contain a larger percentage of solids. Pastes are typically more absorptive and less greasy that ointments prepared with the same components.

[0160] A gel may be described as a semisolid system containing dispersions of small or large molecules in a liquid vehicle that is rendered semisolid by the action of a thickening agent or polymeric material dissolved or suspended in the liquid vehicle. The liquid may include a lipophilic component, an aqueous component or both. Some emulsions may be gels or otherwise include a gel component. Some gels, however, are not emulsions because they do not contain a homogenized blend of immiscible components. Suitable gelling agents include, but are not limited to, modified celluloses, such as hydroxypropyl cellulose and hydroxyethyl cellulose; Carbopol homopolymers and copolymers; and combinations thereof. Suitable solvents in the liquid vehicle include, but are not limited to, diglycol monoethyl ether; alkene glycols, such as propylene glycol; dimethyl isosorbide; alcohols, such as isopropyl alcohol and ethanol. The solvents are typically selected for their ability to dissolve the drug. Other additives, which improve the skin feel and/or emolliency of the formulation, may also be incorporated. Examples of such additives include, but are not limited, isopropyl myristate, ethyl acetate, C12-C15 alkyl benzoates, mineral oil, squalane, cyclomethicone, capric/caprylic triglycerides, and combinations thereof.

[0161] Foams may be described as an emulsion in combination with a gaseous propellant. The gaseous propellant consists primarily of hydrofluoroalkanes (HFAs). Suitable propellants include HFAs such as 1,1,1,2-tetrafluoroethane (HFA 134a) and 1,1,1,2,3,3,3-heptafluoropropane (HFA 227), but mixtures and admixtures of these and other HFAs that are currently approved or may become approved for medical use are suitable. The propellants preferably are not hydrocarbon propellant gases which can produce flammable or explosive vapors during spraying. Furthermore, the compositions preferably contain no volatile alcohols, which can produce flammable or explosive vapors during use.

[0162] Emollients may be described as externally applied agents that soften or soothe skin and are generally known in the art and listed in compendia, such as the “Handbook of Pharmaceutical Excipients”, 4.sup.th Ed., Pharmaceutical Press, 2003. In certain embodiments, the emollients are almond oil, castor oil, ceratonia extract, cetostearoyl alcohol, cetyl alcohol, cetyl esters wax, cholesterol, cottonseed oil, cyclomethicone, ethylene glycol palmitostearate, glycerin, glycerin monostearate, glyceryl monooleate, isopropyl myristate, isopropyl palmitate, lanolin, lecithin, light mineral oil, medium-chain triglycerides, mineral oil and lanolin alcohols, petrolatum, petrolatum and lanolin alcohols, soybean oil, starch, stearyl alcohol, sunflower oil, xylitol and combinations thereof. In one embodiment, the emollients are ethylhexylstearate and ethylhexyl palmitate.

[0163] Surfactants are surface-active agents that lower surface tension and thereby increase the emulsifying, foaming, dispersing, spreading and wetting properties of a product. In certain embodiments, suitable non-ionic surfactants include emulsifying wax, glyceryl monooleate, polyoxyethylene alkyl ethers, polyoxyethylene castor oil derivatives, polysorbate, sorbitan esters, benzyl alcohol, benzyl benzoate, cyclodextrins, glycerin monostearate, poloxamer, povidone and combinations thereof. In one embodiment, the non-ionic surfactant is stearyl alcohol.

[0164] Emulsifiers are surface active substances which promote the suspension of one liquid in another and promote the formation of a stable mixture, or emulsion, of oil and water. In certain embodiments, the emulsifiers are metallic soaps, certain animal and vegetable oils, and various polar compounds. Suitable emulsifiers include acacia, anionic emulsifying wax, calcium stearate, carbomers, cetostearyl alcohol, cetyl alcohol, cholesterol, diethanolamine, ethylene glycol palmitostearate, glycerin monostearate, glyceryl monooleate, hydroxpropyl cellulose, hypromellose, lanolin, hydrous, lanolin alcohols, lecithin, medium-chain triglycerides, methylcellulose, mineral oil and lanolin alcohols, monobasic sodium phosphate, monoethanolamine, nonionic emulsifying wax, oleic acid, poloxamer, poloxamers, polyoxyethylene alkyl ethers, polyoxyethylene castor oil derivatives, polyoxyethylene sorbitan fatty acid esters, polyoxyethylene stearates, propylene glycol alginate, self-emulsifying glyceryl monostearate, sodium citrate dehydrate, sodium lauryl sulfate, sorbitan esters, stearic acid, sunflower oil, tragacanth, triethanolamine, xanthan gum and combinations thereof. In one embodiment, the emulsifier is glycerol stearate. In one embodiment, the emulsifier is glycerol. In one embodiment, the emulsifier is glycerin.

[0165] In some embodiments, compositions disclosed herein are formulated to be applied to a subject's scalp. In some embodiments, the composition is formulated to be used as a product selected from a shampoo, a conditioner, a mousse, a gel, and a spray. Such compositions would be useful for the treatment of seborrheic dermatitis. Treatment of seborrheic dermatitis with such compositions may result in the reduction of a symptom selected from dandruff and cradle cap. However, compositions disclosed herein may be used to treat seborrheic dermatitis at other areas of the body besides the scalp. Non-limiting examples of other areas include the chest, stomach, skin folds, arms, legs, groin area and under breasts.

[0166] In some embodiments, compositions disclosed herein comprise a buffer, wherein the buffer controls a pH of the composition. Preferably, the buffers buffer the composition from a pH of about 4 to a pH of about 7.5, from a pH of about 4 to a pH of about 7, and from a pH of about 5 to a pH of about 7.

[0167] In some embodiments, compositions disclosed herein are formulated to provide or maintain a desirable skin pH. In some embodiments, the desirable skin pH is between about 4.5 and about 6.5. In some embodiments, the desirable skin pH is between about 5 and about 6. In some embodiments, the desirable skin pH is about 5.5. In some embodiments, compositions disclosed herein are formulated with a skin pH modulating agent. Non-limiting examples of pH modulating agents include salicylic acid, glycolic acid, trichloroacetic acid, azeilic acid, lactic acid, aspartic acid, hydrochloride, stearic acid, glyceryl stearate, cetyl palmitate, urea phosphate, and tocopheryl acetate.

[0168] In some embodiments, compositions disclosed herein are formulated to provide more oxygen to the skin. In some embodiments, compositions disclosed herein are formulated to provide more oxygen exposure to the skin. In some embodiments, compositions disclosed herein are formulated to provide more oxygen diffusion into the skin. In some embodiments, compositions disclosed herein are formulated to provide more oxygen diffusion through the skin. In some embodiments, compositions disclosed herein are formulated with an agent that provides more oxygen to the skin. In some embodiments, compositions disclosed herein are used with an agent that provides more oxygen to the skin. In some embodiments, compositions disclosed herein are used before use of an agent that provides more oxygen to the skin. In some embodiments, compositions disclosed herein are used after use of an agent that provides more oxygen to the skin. A non-limiting example of an agent that provides oxygen to the skin is chlorophyll.

[0169] Preservatives can be used to prevent the growth of fungi and microorganisms. Suitable antifungal and antimicrobial agents include, but are not limited to, benzoic acid, butylparaben, ethyl paraben, methyl paraben, propylparaben, sodium benzoate, sodium propionate, benzalkonium chloride, benzethonium chloride, benzyl alcohol, cetylpyridinium chloride, chlorobutanol, phenol, phenylethyl alcohol, and thimerosal. In one embodiment, a concentration of a preservative that is effective to prevent fungal growth is selected, without affecting the effectiveness of the composition for its intended purposed upon topical application.

[0170] Excipients in the formulation are selected based on the type of formulation intended. In certain embodiments, the excipients include gelatin, casein, lecithin, gum acacia, cholesterol, tragacanth, stearic acid, benzalkonium chloride, calcium stearate, glyceryl monostearate, cetostearyl alcohol, cetomacrogol emulsifying wax, sorbitan esters, polyoxyethylene alkyl ethers, polyoxyethylene castor oil derivatives, polyoxyethylene sorbitan fatty acid esters, polyethylene glycols, polyoxyethylene stearates, colloidol silicon dioxide, phosphates, sodium dodecyl sulfate, carboxymethylcellulose calcium, carboxymethylcellulose sodium, methylcellulose, hydroxyethylcellulose, hydroxypropylcellulose, hydroxypropylmethycellulose phthalate, noncrystalline cellulose, magnesium aluminum silicate, triethanolamine, polyvinyl alcohol, polyvinylpyrrolidone, sugars, and starches.

[0171] In some embodiments, compositions disclosed herein are formulated with glycerol. In some instances, a strain of bacteria in the composition ferments the glycerol, thereby producing short chain fatty acids. Non-limiting examples of short-chain fatty acids include acetic acid, lactic acid, and propionic acid. In some embodiments, the strain of bacteria is a Propionibacterium strain. In some embodiments, the strain of bacteria is a P. acnes strain.

[0172] Penetration enhancers are frequently used to promote transdermal delivery of drugs across the skin, in particular across the stratum corneum. Some penetration enhancers cause dermal irritation, dermal toxicity and dermal allergies. However, the more commonly used ones include urea, (carbonyldiamide), imidurea, N,N-diethylformamide, N-methyl-2-pyrrolidine, 1-dodecal-azacyclopheptane-2-one, calcium thioglycate, 2-pyyrolidine, N,N-diethyl-m-toluamide, oleic acid and its ester derivatives, such as methyl, ethyl, propyl, isopropyl, butyl, vinyl and glycerylmonooleate, sorbitan esters, such as sorbitan monolaurate and sorbitan monooleate, other fatty acid esters such as isopropyl laurate, isopropyl myristate, isopropyl palmitate, diisopropyl adipate, propylene glycol monolaurate, propylene glycol monooleatea and non-ionic detergents such as BRIJ® 76 (stearyl poly(10) oxyethylene ether), BRIJ® 78 (stearyl poly(20)oxyethylene ether), BRIJ® 96 (oleyl poly(10)oxyethylene ether), and BRIJ® 721 (stearyl poly (21) oxyethylene ether) (ICI Americas Inc. Corp.).

[0173] The composition can be formulated to comprise the health-associated microbe or probiotic at a particular concentration. For example, the composition can comprise an amount of probiotic such that the microorganisms may be delivered in effective amounts. In certain embodiments, the amount of probiotic delivered is at least 1×10³, 1×10⁴, 1×10⁵, 1×10⁶, 1×10⁷, 1×10⁸, 1×10⁹, 1×10¹⁰ colony forming units per unit dose. The composition may be formulated with the health-associated microbe or probiotic in a proportion of at least about 0.0001% (expressed by dry weight), from about 0.0001% to about 99%, from about 0.001% to about 90% by weight, from about 0.01% to about 80% by weight, and from about 0.1% to about 70% by weight, relative to the total weight of the composition. In general, a composition intended to be administered topically comprises at least 1×10³, 1×10⁴, 1×10⁵, 1×10⁶, 1×10⁷, 1×10⁸, 1×10⁹, 1×¹⁰ microorganisms per gram of carrier, or at equivalent doses calculated for inactive or dead microorganisms or for bacterial fractions or for metabolites produced.

[0174] Microbes disclosed herein may be delivered in effective amounts per unit dose, of at least about 1×10² colony forming units (cfu) to about 1×10²⁰ cfu. In the particular case of the compositions that have to be administered topically, the concentration of each bacterial strain and/or corresponding fraction and/or metabolite can be adjusted so as to correspond to doses (expressed as bacterial equivalent) ranging from about 1×10⁵ to about 1×10¹² cfu/dose.

[0175] Compositions disclosed herein for topical application generally comprise from about 1×10² to about 1×10¹⁵ cfu/g, from about 1×10⁵ to about 1×10¹² cfu/g, or from about 1×10⁶ to about 10×10¹² cfu/g of bacteria.

[0176] In certain embodiments, compositions disclosed herein are formulated in order to deliver at least 10⁶ microbes per cm² of skin. In certain embodiments, the composition is formulated in order to deliver at least 10⁷ microbes per cm² of skin. In certain embodiments, the composition is formulated in order to deliver at least 10⁸ microbes per cm² of skin. In certain embodiments, the composition is formulated in order to deliver at least 10⁹ microbes per cm² of skin. In certain embodiments, the composition is formulated in order to deliver less than 10⁹ microbes per cm² of skin. In certain embodiments, the composition is formulated in order to deliver less than 10⁸ microbes per cm² of skin. In certain embodiments, the composition is formulated in order to deliver less than 10⁷ microbes per cm² of skin. In certain embodiments, the composition is formulated in order to deliver between about 10⁷ and 10⁸ microbes per cm² of skin. In certain embodiments, the composition is formulated in order to deliver between about 106 microbes per cm² of skin and about 10¹⁰ microbes per cm² of skin. In certain embodiments, the composition is formulated in order to deliver between about 106 microbes per cm² of skin and about 10⁹ microbes per cm² of skin. In certain embodiments, the composition is formulated in order to deliver between about 10⁷ microbes per cm² of skin and about 10¹⁰ microbes per cm² of skin. In certain embodiments, the composition is formulated in order to deliver between about 10⁷ microbes per cm² of skin and about 10⁹ microbes per cm² of skin.

[0177] In certain embodiments, compositions disclosed herein are formulated at a concentration of about 10⁵ microbes per milliliter to about 10¹² microbes per milliliter. In certain embodiments, compositions disclosed herein are formulated at a concentration of about 106 microbes per milliliter. In certain embodiments, compositions disclosed herein are formulated at a concentration of about 10⁷ microbes per milliliter. In certain embodiments, compositions disclosed herein are formulated at a concentration of about 10⁸ microbes per milliliter. In certain embodiments, compositions disclosed herein are formulated at a concentration of about 10⁹ microbes per milliliter. In certain embodiments, compositions disclosed herein are formulated at a concentration of about 10¹⁰ microbes per milliliter.

[0178] In certain embodiments, compositions disclosed herein for topical or oral use contain biologic stability compounds including but not limited to carbohydrates such as trehalose, mannose, fructose, glucose, sucrose, lactose, raffinose, stachyose, melezitose, dextran, and sugar alcohols; and/or cryopreservatives such as glycerol, bovine-free media, (e.g., tryptic soy broth), whey protein, NaCl, phosphate buffer, MgCl, lyophilized bacteria, or other inactive/killed bacteria.

[0179] After formulation, composition disclosed herein may be packaged in a manner suitable for delivery and use by an end user. In one embodiment, the composition is placed into an appropriate dispenser and shipped to the end user. Examples of a final container may include a pump bottle, squeeze bottle, jar, tube, capsule or vial.

[0180] In some embodiments, compositions disclosed herein can be added to an applicator before packaging. Non-limiting examples of applicators include a cotton pad, a polyester pad, a q-tip, a sponge, and a brush. In some embodiments, the applicator is placed in a package. Non-limiting examples of a package includes bags and foil or wax lined paper packets. The interior of the package may be sterile. In some embodiments, air in the package is removed with a vacuum before sealing. In some embodiments, the package is heat-sealed. In some embodiments, the package is sealed with adhesive.

[0181] In another embodiment, compositions disclosed herein are lyophilized or freeze dried, for reconstitution before application to the skin. In one embodiment, lyophilization or freeze drying is conducted with one or more excipients, such as glycerol or other sugar alcohols, to improve the shelf life of the selected, transformed, or engineered bacteria. In one embodiment, the lyophilized composition does not include trehalose (.alpha.-D-glucopyranosyl-1,1-.alpha.-D-glucopyranosyde). In some embodiments, the composition does not have to be frozen.

[0182] Compositions disclosed herein may be packaged in one or more containers. For example, a single bottle, tube, container, or capsule may be divided to two equal or unequal parts wherein one part contains the bacteria, in their packing form (freeze dried/inactive, etc.), and the other part contains an activation material, which can be a liquid or a gel. The single bottle or container can be designed so that an end user can dispense with a single force applied to the container all or a portion of the contents in the two container parts, to dispense onto the skin or other surface the selected, transformed, or engineered bacteria and the activation material. The kit may also be of the form that comprises two or more containers, one container with the population(s) of selected, transformed, or engineered bacteria and the other with a formulation for admixture with the populations of selected, transformed, or engineered bacteria. In another example, two or more containers, one container with the population of selected, transformed, or engineered bacteria, the other container with natural nonpathogenic skin bacteria that are not selected, transformed, or engineered, and a third container with a formulation for admixture with the populations of selected, transformed, or engineered bacteria. In another example, the two or more containers composing the single bottle had one pump connected to two separate tubes, each draining from a different chamber. The kit may also include one or more complementary products, such as soaps, body washes or moisturizing lotions with certain pH, lotions or creams containing active compounds, bacteria and limiting factors etc. In another embodiment, the complementary product is a limiting factor that will enhance the growth, activity and/or expression of the compound of interest to provide a lasting or continuous expression of the compound. The complementary product may include any compound beneficial to the activity of the original product, and enhance its activity for lasting efficacy. Another contemplated packaging is one wherein the population of selected, transformed, or engineered bacteria is maintained as a layer on a bandage or film that is combined with a second layer of bandage/film that will allow activation of the bacteria, and that optionally may also limit reproduction/growth factors. In another embodiment, the final product is stored refrigerated, with the bacteria being in their active state. In another embodiment, the bacteria are stored in a small bead of water soluble cellulose. The beads can be mixed in any solution such as sunscreen/moisturizing/body wash or soap.

[0183] In yet another embodiment, this disclosure provides for compositions comprising a healthy skin microbiome transplant. Healthy skin microbiome transplants disclosed herein comprise a population of bacteria harvested from healthy or normal skin. Healthy skin microbiome transplants disclosed herein can be characterized as microbiomes that induce a low level of human inflammatory mediators (at the RNA and/or protein level) from a population of human cells when the microbiome is incubated with the population of human cells. The population of human cells may be a subject's own keratinocytes. The population of human cells may be pooled keratinocytes. Non-limiting examples of inflammatory mediators include acne associated inflammatory markers such as IL-8, IL-6, TNF-alpha, INF-alpha, IL-1, and beta defensin. Methods of measuring levels of these mediators either at the mRNA, protein or functional level are known in the art and include, quantitative real-time PCR, northern blot, RNA-seq, microarray, ELISA, homogenous protein assays, immunoblot, or mass spectrometry.

[0184] In yet other embodiments are compositions comprising an individual's own modified microbiome. Compositions comprising an individual's own modified microbiome may be obtained by methods disclosed herein. In some embodiments, the individual's own modified microbiome is produced by harvesting or capturing the individual's own microbiome (e.g., from a skin swab), culturing the microbiome, and removing at least one inflammatory strain of bacteria. In some embodiments, the individual's own modified microbiome is produced by harvesting or capturing the individual's own microbiome (e.g., from a skin swab), culturing the microbiome, and removing at least one pathogenic strain of bacteria. In some embodiments, an inflammatory strain is a pathogenic strain. In some embodiments, an inflammatory strain or pathogenic strain is identified by incubating the strain with keratinocytes and detecting production of inflammatory mediators from the keratinocytes. In some embodiments, an inflammatory strain or pathogenic strain is identified by incubating the strain with keratinocytes and quantifying production of inflammatory mediators from the keratinocytes (e.g., the strain produces higher levels of inflammatory mediators from the keratinocytes than a health-associated strain disclosed herein). In some embodiments, an inflammatory strain or pathogenic strain is identified by incubating the strain with keratinocytes and detecting undesirable keratinocyte gene expression or undesirable keratinocyte activity. Undesirable keratinocyte gene expression or undesirable keratinocyte activity would generally be understood by one skilled in the art to mean expression or activity in keratinocytes that promotes a skin disorder. In some instances, the keratinocytes are the subject's keratinocytes. In some instances, the keratinocytes are pooled keratinocytes. In some instances, methods comprise identifying and removing known acne associated strains such as, by way of non-limiting example, some P. acnes strains of ribotypes RT4 and RT5, and clade Ia bacteria. In some instances, methods comprise identifying and selecting only non-inflammatory strains identified by the method above or known to be associated with healthy skin and introducing the modified biome to the patient. Non-limiting examples of non-inflammatory strains include P. acnes strains of ribotypes RT2, RT6, and clade II bacteria.

[0185] In yet another embodiment is a composition comprising a microbiome from a healthy individual's stool. These compositions may be referred to herein as a “fecal transplant.” In some embodiments, the microbiome is a complete microbiome of a healthy individual's stool. In some embodiments, the microbiome is a partial microbiome of a healthy individual's stool. In some instances, the healthy individual does not have acne. In some instances, the healthy individual does not have an inflammatory condition. In some instances, the healthy individual does not have an inflammatory skin condition. Non-limiting examples of inflammatory conditions are acne, eczema, psoriasis, seborrheic dermatitis, rosacea, lupus, pemphigus, pemphigoid, scleroderma, alopecia areata, lichen sclerosis, lichen planus, pruritus, prurigo nodularis, lichen simplex chronicus, inflammatory bowel disease, colitis, irritable bowel syndrome, atherosclerosis, CAD, diabetes, HIV, and cancer. In some embodiments, the healthy individual is not a tissue transplant patients, is not taking an immunosuppressive drug, or is not currently/recently (within 12 weeks) receiving an antibiotic therapy. In some embodiments, the microbiome comprises strains of bacteria that produce no inflammatory mediators when co-incubated colonic mucosal cells. In some embodiments, strains of bacteria that produce no inflammatory mediators when co-incubated colonic mucosal cells are identified by 16S, 18S, or whole genome sequencing. In some embodiments, the partial microbiome is a modified microbiome, wherein the modified microbiome is derived from a fecal transplant by removing pathogenic strains or introducing health-associated strains.

### Additional Active Ingredients

[0186] Compositions disclosed herein may comprise additional active ingredients. In certain embodiments, compositions disclosed herein comprise at least one non-living, non-microbial constituent. By way of non-limiting example, the non-living, non-microbial constituent may be selected from a small molecule, a fatty acid, an antibiotic, a metabolite, an antioxidant, and a retinoid. Non-limiting examples of antioxidants are vitamin C and vitamin E. Non-limiting examples of a retinoid are tretinoin, tazarotene, adapalene, and retinol. In some embodiments, the non-living, non-microbial constituent is vitamin D, which may be in the form of calciptotriene. In some embodiments, the additional active ingredient is an agent that has anti-inflammatory activity.

[0187] In certain embodiments, the composition contains an antibiotic. Non-limiting examples of antibiotics include macrolide, tetracycline, β-lactam, aminoglycoside, cephalosporin, carbapenems, quinolone/fluoroquinolone, sulfonamides, salicylic acid, glycolic acid, azaleic acid, live phage therapy, synthetic phage contractile nanotubes, laser, dapsone, benzoyl peroxide, benzoyl peroxide/resveratrol combinations, and any combination thereof. In some embodiments, the antibiotic is selected from clindamycin, doxycycline, erythromycin, and tetracycline, wherein the antibiotic is formulated for topical administration. In some embodiments, the antibiotic is selected from erythromycin, tetracycline, doxycycline and minocycline, wherein the antibiotic is formulated for oral administration.

[0188] In certain embodiments, a composition disclosed herein comprises a topical anti-acne medication such as benzoyl peroxide or salicylic acid. The concentration of benzoyl peroxide or salicylic acid included in a composition may be lower than that commonly included in a single formulation (without a health-associated microbe or probiotic). In some embodiments, the concentration of the anti-acne medication is between about 0.1% and about 3%. In some embodiments, the concentration of the anti-acne medication is between about 0.1% and about 2.5%. In some embodiments, the concentration of the anti-acne medication is between about 0.5% and about 2.5%. In some embodiments, the concentration of the anti-acne medication is between about 1% and about 2.5%. In some embodiments, the concentration of the anti-acne medication is less than about 2.5%. In some embodiments, the concentration of the anti-acne medication is less than about 2%. In some embodiments, the concentration of the anti-acne medication is less than about 1.5%. In some embodiments, the concentration of the anti-acne medication is less than about 1%. In some embodiments, the concentration of the anti-acne medication is less than about 0.5%. In some embodiments, the concentration of the anti-acne medication is less than about 0.1%.

[0189] In certain embodiments, compositions disclosed herein comprise a topical anti-acne medication such as a retinoid. Non-limiting examples of topical retinoid compounds include retinoic acid, tretinoin, adapalene, and tazarotene. In certain embodiments, compositions disclosed herein comprise resveratrol or trans-resveratrol. In some embodiments, the concentration of the retinoid or resveratrol in the composition is less than about 10%. In some embodiments, the concentration of the retinoid or resveratrol in the composition is less than about 5%. In some embodiments, the concentration of the retinoid or resveratrol in the composition is less than about 2.5%. In some embodiments, the concentration of the retinoid or resveratrol in the composition is less than about 1%. In some embodiments, the concentration of the retinoid or resveratrol in the composition is less than about 0.5%. In some embodiments, the concentration of the retinoid or resveratrol in the composition is between about 0.5% and about 10%. In some embodiments, the concentration of the retinoid or resveratrol in the composition is between about 1% and about 10%. In some embodiments, the concentration of the retinoid or resveratrol in the composition is between about 0.5% and about 2.5%.

[0190] In some embodiments, compositions disclosed herein comprise at least one omega-3 fatty acid. Non-limiting examples of omega-3 fatty acids include hexadecatrienoic acid (HTA), α-Linolenic acid (ALA), stearidonic acid (SDA), eicosatrienoic acid (ETE), eicosatetraenoic acid (ETA), eicosapentaenoic acid (EPA), heneicosapentaenoic acid (HPA), docosapentaenoic acid (DPA), clupanodonic acid, docosahexaenoic acid (DHA), tetracosapentaenoic acid, tetracosahexaenoic acid (nisinic acid), and phytosphingosine.

[0191] In some embodiments, compositions disclosed herein comprise an acid selected from glycolic acid, azaelic acid, and trichloroacetic acid. In some embodiments, compositions disclosed herein comprise a natural extract, such as tea tree oil or green tea extract.

[0192] In some embodiments, the additional active ingredient comprises a drug targeting at least one strain of P. acnes. In some embodiments, the drug targeting at least one strain of P. acnes is a small molecule drug. In some embodiments, the drug targeting at least one strain of P. acnes is a small molecule inhibitor of an enzyme expressed by P. acnes. In some embodiments, the enzyme expressed by P. acnes is required for P. acnes growth or P. acnes energy metabolism. In some embodiments, the drug targeting at least one strain of P. acnes is a biologic. In some embodiments, the biologic comprises a peptide. In some embodiments, the biologic comprises an antibody or antigen binding fragment. In some embodiments, the biologic comprises and antibody-small molecule conjugate. In some embodiments, the biologic comprises and antibody-drug conjugate. In some embodiments, the biologic comprises a nucleic acid. In some embodiments, then nucleic acid comprises an antisense nucleic acid molecule, wherein the antisense nucleic acid molecule inhibits an enzyme expressed by P. acnes. In some embodiments, the enzyme expressed by P. acnes is required for P. acnes growth or P. acnes energy metabolism. In some embodiments, the antisense nucleic acid molecule comprises siRNA. In some embodiments, the antisense nucleic acid molecule comprises a shRNA. In some embodiments, the antisense nucleic acid molecule comprises a guide RNA to be used with a CRISPR-associated protease. In some embodiments, the additional active ingredient (e.g., guide RNA and CRISPR-associated protease) and targets a genomic element specific for strains of P. acnes associated with acne.

### Methods of Treating Skin Disorders

[0193] Provided herein, in some aspects, are methods for treating or preventing skin disorders disclosed herein. In some aspects, the methods comprise administering a strain of bacteria disclosed herein, wherein the strain of bacteria is incorporated into a pharmaceutical composition. In some aspects, the methods comprise administering a composition disclosed herein. In some aspects, the disclosure provides methods for treating or preventing acne. Methods for treating or preventing acne generally comprise administering an effective amount of a strain of bacteria disclosed herein to the skin of a subject in need thereof. In some embodiments, methods comprise administering at least one composition disclosed herein. In some embodiments, methods comprise administering at least one species of bacteria disclosed herein. In some embodiments, methods comprise administering at least one strain of bacteria disclosed herein. In some embodiments, methods comprise administering at least one ribotype of bacteria disclosed herein. In some embodiments, methods comprise administering at least one probiotic disclosed herein. In some embodiments, methods comprise administering at least one health-associated microbe disclosed herein. In some embodiments, methods comprise administering at least one selected species of selected bacteria disclosed herein. In some embodiments, methods comprise administering at least one selected strain of selected bacteria disclosed herein. In some embodiments, methods comprise administering at least one selected, transformed, or engineered bacteria disclosed herein. In some embodiments, methods comprise administering at least one genetically modified bacteria disclosed herein. In some embodiments, methods comprise administering at least one genetically engineered bacteria disclosed herein. In some embodiments, methods comprise administering at least one health-associated strain of bacteria described herein.

[0194] In some embodiments, methods disclosed herein comprise administering an isolated strain of bacteria. In some embodiments, methods disclosed herein comprise administering an isolated strain of bacteria. In some embodiments, methods disclosed herein comprise administering a purified strain of bacteria. In some embodiments, methods disclosed herein comprise administering a purified and isolated strain of bacteria. In some embodiments, methods disclosed herein comprise selecting, isolating, or purifying a strain of bacteria. Selecting, isolating or purifying may comprise isolating a single clone of bacteria and propagating it to obtain a selected, isolated, or purified strain. In some embodiments, the methods comprise selecting, isolating or purifying a plurality of strains of bacteria to obtain at least a first selected, isolated, or purified strain and a second selected, isolated, or purified strain. In some embodiments, the methods further comprise combining the first selected, isolated, or purified strain and the second selected, isolated, or purified strain in a pharmaceutical composition. In some embodiments, the first selected, isolated, or purified strain or the second selected, isolated, or purified strain is selected from strains disclosed herein.

[0195] In some embodiments, the first selected, isolated, or purified strain and the second selected, isolated, or purified strain are selected from strains disclosed herein.

[0196] In some embodiments, methods comprise administering at least one health-associated strain of bacteria selected from a health-associated strain of Propionibacterium, Staphylococcus and Lactobacillus bacteria. In some embodiments, methods comprise administering at least one health-associated strain of Propionibacterium bacteria. In some embodiments, methods comprise administering at least one health-associated strain selected from a health-associated strain of P. acnes, a health-associated strain of P. granulosum, a health-associated strain of P. avidum, a health-associated strain of P. acnes subsp. defendens, and a health-associated Staphylococcus, as described herein. In some embodiments, the health-associated strain of P. acnes is not P. acnes subsp. acnes. In some embodiments, methods comprise administering at least one health-associated strain of P. acnes. In some embodiments, methods comprise administering at least one health-associated fungus. The health-associated fungus may be Malassezia.

[0197] In some embodiments, the methods comprise administering a microbe disclosed herein. In some embodiments, the methods comprise administering a mixture of at least two microbes disclosed herein. In some embodiments, the methods comprise administering at least one health-associated microbe disclosed herein. In some embodiments, the microbe is a fungus. In some embodiments, the microbe is a protist. In some embodiments, the microbe is bacteria. In some embodiments, the bacteria comprise a strain of Propionibacterium bacteria. In some embodiments, the bacteria comprise a strain of P. acnes. In some embodiments, the bacteria comprise a strain of P. avidum. In some embodiments, the bacteria comprise a strain of P. granulosum. In some embodiments, the bacteria comprise a strain of P. acnes subsp. defendens. In some embodiments, the bacteria consist essentially of at least one strain of P. acnes. In some embodiments, the bacteria consist essentially of at least one strain of P. avidum. In some embodiments, the bacteria consist essentially of at least one strain of P. granulosum. In some embodiments, the bacteria consist essentially of at least one strain of P. acnes subsp. defendens.

[0198] In some embodiments, methods comprise administering a composition disclosed herein. In some embodiments, methods comprise administering a composition having a formulation disclosed herein.

[0199] In certain embodiments, methods disclosed herein comprise applying an effective amount of a composition containing a plurality of microbes of different ribotypes. In certain embodiments, the strain is a P. acnes strain of a ribotype selected from RT1, RT2, RT3, RT4, RT5, RT7, RT8, RT9, and RT10. In certain embodiments, the strain is a P. acnes strain of a ribotype selected from RT1, RT2, RT3, RT7, RT8, RT9, and RT10. In certain embodiments, the plurality of microbes is a mixture of two or more P. acnes strains of different ribotypes. In certain embodiments, the different ribotypes comprise RT1 and RT2. In certain embodiments, the different ribotypes comprises RT1 and RT3. In certain embodiments, the different ribotypes comprise RT1 and not RT6. In certain embodiments, the different ribotypes comprise RT2 and RT3. In certain embodiments, the v comprises RT2 and not RT6. In certain embodiments, the different ribotypes comprise RT2 and RT3. In certain embodiments, the different ribotypes comprise RT3 and not RT6. In certain embodiments, the different ribotypes consist essentially of RT1 and RT2. In certain embodiments, the different ribotypes consist essentially of RT1 and RT3. In certain embodiments, the different ribotypes consist essentially of RT1 and not RT6. In certain embodiments, the different ribotypes consist essentially of RT2 and RT3. In certain embodiments, the different ribotypes consist essentially of RT2 and not RT6. In certain embodiments, the different ribotypes consist essentially of RT2 and RT3. In certain embodiments, the different ribotypes consist essentially of RT3 and not RT6. In certain embodiments the mixture does not comprise ribotype RT6.

[0200] In certain embodiments, methods described herein comprise applying an effective amount of a composition containing a plurality of microbes of different ribotypes. In certain embodiments, the plurality of microbes is a mixture of three or more P. acnes strains of different ribotypes. In certain embodiments, the mixture comprises RT1, RT2, and RT3. In certain embodiments, the mixture comprises RT2, RT3, and not RT6. In certain embodiments, the mixture comprises RT1, RT2, and RT6. In certain embodiments, the mixture comprises RT1, RT3, and not RT6. In certain embodiments, the mixture consists essentially of RT1, RT2, and RT3. In certain embodiments, the mixture consists essentially of RT2, RT3, and not RT6. In certain embodiments, the mixture consists essentially of RT1, RT2, and not RT6. In certain embodiments, the mixture consists essentially of RT1, RT3, and not RT6. In certain embodiments the mixture does not comprise RT6.

[0201] Methods described herein comprise applying probiotics of various strains. Compositions described herein comprise various strains of bacteria. In certain embodiments, the strain has at least 50% homology to a strain described herein. In certain embodiments, the strain has at least 60% homology to a strain described herein. In certain embodiments, the strain has at least 70% homology to a strain described herein. In certain embodiments, the strain has at least 80% homology to a strain described herein. In certain embodiments, the strain has at least 90% homology to a strain described herein. In certain embodiments, the strain has at least 95% homology to a strain described herein. In certain embodiments, the strain has at least 50% homology to SEQ ID NO: 51, SEQ ID NO: 52, SEQ ID NO: 53, or SEQ ID NO: 54. In certain embodiments, the strain has at least 60% homology to SEQ ID NO: 51, SEQ ID NO: 52, SEQ ID NO: 53, or SEQ ID NO: 54. In certain embodiments, the strain has at least 70% homology to SEQ ID NO: 51, SEQ ID NO: 52, SEQ ID NO: 53, or SEQ ID NO: 54. In certain embodiments, the strain has at least 80% homology to SEQ ID NO: 51, SEQ ID NO: 52, SEQ ID NO: 53, or SEQ ID NO: 54. In certain embodiments, the strain has at least 90% homology to SEQ ID NO: 51, SEQ ID NO: 52, SEQ ID NO: 53, or SEQ ID NO: 54. In certain embodiments, the strain has at least 95% homology to SEQ ID NO: 51, SEQ ID NO: 52, SEQ ID NO: 53, or SEQ ID NO: 54. In certain embodiments, the strain has at least 99% homology to SEQ ID NO: 51, SEQ ID NO: 52, SEQ ID NO: 53, or SEQ ID NO: 54. In certain embodiments, the strain has 100% homology to SEQ ID NO: 51, SEQ ID NO: 52, SEQ ID NO: 53, or SEQ ID NO: 54.

[0202] In certain embodiments, described herein, are methods for treating or preventing acne comprising: administering an effective amount of a metabolite produced by a strain of P. acnes to a subject in need thereof. In certain embodiments, the metabolite is selected from the group comprising bacterial culture supernatant, cell lysate, proteins, nucleic acids, lipids, and other bacterial molecules. In certain embodiments, the metabolite is selected from the group comprising bacterial culture supernatant, cell lysate, proteins, nucleic acids, lipids, and other bacterial molecules.

[0203] In some embodiments, compositions and methods disclosed herein may comprise use of bacteria that does not comprise P. acnes bacteria, or the application thereof, respectively. In some embodiments, the bacteria comprises a Staphylococcus strain. In some embodiments, compositions and methods disclosed herein may comprise use of fungus, such as Malassezia.

[0204] In some embodiments, described herein, methods for treating or preventing acne comprising: administering an effective amount of bacteria associated with healthy or normal skin. Healthy or normal skin may be skin essentially free of acne. In some embodiments, described herein, methods for treating or preventing acne comprising: administering an effective amount of bacteria that produces low to absent levels of pro-inflammatory mediators when co-incubated with a subject's keratinocytes.

[0205] In some embodiments, described herein, are methods for treating or preventing acne comprising: administering an effective amount of a bacterium that does not induce expression of RNA that encodes pro-inflammatory proteins. In some embodiments, described herein, methods for treating or preventing acne comprising: administering an effective amount of a bacterium that does not induce expression of pro-inflammatory proteins. In some embodiments, described herein, methods for treating or preventing acne comprising: administering an effective amount of a bacterium that does not induce activity of pro-inflammatory proteins. In some embodiments, described herein, methods for treating or preventing acne comprising: administering an effective amount of a bacterium that does not induce expression of RNA that encodes pro-inflammatory proteins.

[0206] In some embodiments, described herein, are methods for treating or preventing acne comprising: administering an effective amount of a bacterium that does not increase expression of RNA that encodes pro-inflammatory proteins. In some embodiments, described herein, are methods for treating or preventing acne comprising: administering an effective amount of a bacterium that does not increase expression of pro-inflammatory proteins. In some embodiments, described herein, methods for treating or preventing acne comprising: administering an effective amount of a bacterium that does not increase activity of pro-inflammatory proteins.

[0207] In some embodiments, described herein, are methods for treating or preventing acne comprising: administering an effective amount of a bacterium that does not increase expression of RNA that encodes pro-inflammatory proteins to a level that they would cause or increase acne when the bacterium is applied to a subject. In some embodiments, described herein, are methods for treating or preventing acne comprising: administering an effective amount of a bacterium that does not increase expression of pro-inflammatory proteins to a level that they would cause or increase acne when the bacterium is applied to a subject. In some embodiments, described herein, methods for treating or preventing acne comprising: administering an effective amount of a bacterium that does not increase activity of pro-inflammatory proteins to a level that they would cause or increase acne when the bacterium is applied to a subject. Non-limiting examples of pro-inflammatory proteins include IL-8, IL-1, IL-6, TNF-alpha, INF-alpha, and human beta defensin.

[0208] In some embodiments, described herein, are methods for treating or preventing seborrheic dermatitis comprising: administering an effective amount of a health-associated strain of Propionibacterium to a subject in need thereof. In some embodiments, described herein, are methods for treating or preventing seborrheic dermatitis comprising: administering an effective amount of a health-associated strain of P. acnes to a subject in need thereof. In some embodiments, the methods are performed after the subject has undergone a cosmetic hair treatment (e.g., hair dye). In some embodiments, the effective amount is an amount that results in greater than about 55% Propionibacterium on an affected area of the scalp or skin of the subject. In some embodiments, the effective amount is an amount that results in greater than about 60% Propionibacterium on an affected area of the scalp or skin of the subject. In some embodiments, the effective amount is an amount that results in greater than about 65% Propionibacterium on an affected area of the scalp or skin of the subject. In some embodiments, the effective amount is an amount that results in greater than about 70% Propionibacterium on an affected area of the scalp or skin of the subject. In some embodiments, the effective amount is an amount that results between about 55% Propionibacterium and about 75% Propionibacterium on an affected area of the scalp or skin of the subject. In some embodiments, the effective amount is an amount that results between about 65% Propionibacterium and about 80% Propionibacterium on an affected area of the scalp or skin of the subject. In some embodiments, the effective amount is an amount that results between about 70% Propionibacterium and about 80% Propionibacterium on an affected area of the scalp or skin of the subject. In some embodiments, the effective amount is an amount that results between about 70% Propionibacterium and about 85% Propionibacterium on an affected area of the scalp or skin of the subject. In some embodiments, the effective amount is an amount that provides a desirable ratio of Propionibacterium to Staphylococcus on the scalp or skin of the subject. The desirable ratio of Propionibacterium to Staphylococcus may be selected from about 2:1, about 2.5:1, about 3:1, about 3.5:1 and about 4:1. The desirable ratio of Propionibacterium to Staphylococcus may be selected from at least about 2:1, at least about 2.5:1, at least about 3:1, at least about 3.5:1 and at least about 4:1. The desirable ratio of Propionibacterium to Staphylococcus may be between about 1.5:1 and about 4:1. The desirable ratio of Propionibacterium to Staphylococcus may be between about 2:1 and about 4:1. The desirable ratio of Propionibacterium to Staphylococcus may be between about 2.5:1 and about 4:1. The desirable ratio of Propionibacterium to Staphylococcus may be between about 3:1 and about 4:1. In some embodiments, an effective amount is an amount that provides a desirable amount of a Malassezia fungus.

[0209] In some embodiments, the methods of treating disclosed herein further comprise determining strains of bacteria on the skin of the subject that cause or promote inflammation of the skin of the subject. In some embodiments, methods comprise assessing an inflammatory mediated response in a sample of keratinocytes. In some embodiments, methods comprise assessing an inflammatory mediated response in a sample of keratinocytes obtained from a subject. The subject may be a healthy subject. The subject may be a subject to be treated, such as a subject suffering from acne. In some embodiments, the methods comprise pooling or culturing keratinocytes from multiple subjects.

[0210] Methods disclosed herein may comprise administering a drug to the subject. In some embodiments, the drug is administered orally. In some embodiments, the drug is administered topically. In some embodiments, the drug is administered topically to the skin of the subject that is affected by acne. In certain embodiments, described herein, are methods for preventing or treating acne in a subject comprising: administering an effective amount of a drug specifically targeting P. acnes. In certain embodiments, described herein, are methods for preventing or treating acne in a subject comprising: administering an effective amount of a drug targeting P. acnes of a ribotype selected from RT1, RT2, RT3, RT4, RT5, RT7, RT8, RT9, and RT10, and combinations thereof. In certain embodiments, described herein, are methods for preventing or treating acne in a subject comprising: administering an effective amount of a drug targeting P. acnes of a ribotype selected from RT1, RT2, RT3, RT7, RT8, RT9, and RT10, and combinations thereof. In certain embodiments, described herein, are methods for preventing or treating acne in a subject comprising: administering an effective amount of a drug targeting a strain of bacteria or fungus that induces or promotes production of inflammatory mediators from a subject's keratinocytes when co-incubated with a subject's keratinocytes. In certain embodiments, described herein, are methods for preventing or treating acne in a subject comprising: administering an effective amount of a drug targeting a strain of bacteria or fungus that induces or promotes production of inflammatory mediators from a subject's keratinocytes when a factor produced by the bacteria or fungus is co-incubated with a subject's keratinocytes. Such drugs are disclosed herein, e.g., small molecules, antisense molecules, siRNA, biologics, antibodies, and combinations thereof.

[0211] Methods disclosed herein may comprise performing laser therapy on the skin of the subject. In some embodiments, laser therapy is performed prior to administration of a drug or bacteria disclosed herein to a subject. In some embodiments, laser therapy is performed after administration of a drug or bacteria disclosed herein to a subject. In some embodiments, laser therapy is performed simultaneously with administration of a drug or bacteria disclosed herein to a subject. The laser therapy may be a blue or red-light laser targeting porphyrins.

[0212] Compositions disclosed herein may be administered, daily, weekly, or monthly. In certain embodiments, the composition is administered twice daily. In certain embodiments, the composition is administered at least twice weekly. In certain embodiments, the composition is administered at least twice monthly.

### Combination Treatments

[0213] It is envisioned that the any of the compositions, health-associated microbes or probiotics disclosed herein can be used in combination with other standard treatments. For example, in some embodiments, methods comprise administering compositions disclosed herein before, after, or simultaneously with administration of an additional therapeutic agent. In some embodiments, the methods may comprise topically administering an antibiotic. Non-limiting examples of topical antibiotics include clindamycin, doxycycline, erythromycin, and tetracycline. In some embodiments, the methods may comprise orally administering an antibiotic. Non-limiting examples of oral antibiotics include erythromycin; or a tetracycline, such as doxycycline or minocycline. Other standard treatments may comprise administering an anti-inflammatory agent, an antioxidant, an acid, light therapy, or a combination thereof.

[0214] In some embodiments, methods comprise treating the subject with a laser. In some embodiments, methods comprise treating the subject with blue light. In some embodiments, methods comprise treating the subject with red light. In some embodiments, methods comprise treating the subject with a targeted laser device and/or active ingredient directed to at least one pro-inflammatory strain of P. acnes. In some embodiments, methods comprise treating with a laser that targets porphyrins.

Treatment of Acne and Other Disorders with Microbiome Transplant

[0215] In certain embodiments, described herein, are methods to treat skin disorders comprising administering a microbiome transplant from a healthy donor or a donor unaffected by a disease to a subject in need thereof. In certain embodiments, described herein, are methods to treat skin disorders comprising administering a microbiome transplant from a healthy donor unaffected by a skin disorder. In certain embodiments, the skin disorder is acne. In certain embodiments, the skin disorder is selected from acne, eczema, psoriasis, seborrheic dermatitis, rosacea, autoimmune disease, lichen sclerosis, lichen planus, pruritus, prurigo nodularis, lichen simplex chronicus, and a combination thereof.

[0216] In a certain embodiments, the disclosure provides method for obtaining and purifying a microbiome from a stool sample of a healthy individual, wherein the healthy individual is a first subject not suffering from acne or any other skin disorder, and transplanting that to a second subject that suffers from a skin disorder. The skin disorder may be selected from acne, eczema, psoriasis, seborrheic dermatitis, rosacea, autoimmune disease such as lupus, bullous pemphigoid, pemphigus, lichen planus, pruritus, and xerosis. In another embodiment, the disclosure provides a method for obtaining and purifying a microbiome from an oral sample of a healthy individual not suffering from an inflammatory disorder, and transplanting that to a subject that suffers from a skin disorder. Non-limiting examples of inflammatory conditions include autoimmune disease (e.g., vitiligo, pernicious anemia, alopecia areata, pemphigus, pemphigoid, lupus, scleroderma, diabetes), atherosclerosis, and arthritis.

### Diagnosis of Acne and Other Diseases

[0217] Health-associated P. acnes can be differentiated from disease-associated P. acnes based on genetic differences. For example, disease-associated P. acnes have been shown to harbor genomic elements that encode for multiple virulence genes. Many health-associated P. acnes, on the other hand, carry clustered regularly interspaced short palindromic repeat (CRISPR) elements that prevent health-associated P. acnes from acquiring virulence genes. In addition to genetic differences, an increase in P. acnes derived molecules such as porphyrins, proteases, lipases, and hemolysins, may be associated with disease. Therefore, genes encoding for biosynthesis of P. acnes derived molecules (e.g., porphyrins, proteases, lipase, and hemolysins) may be useful to distinguish between health-associated P. acnes and disease-associated P. acnes.

[0218] In one aspect, provided herein are methods of differentiating health-associated P. acnes bacteria from disease-associated P. acnes bacteria based on genetic markers. Exemplary methods comprise measuring expression of one or more genetic markers including, but not limited to, deoR, Cas5, pIMPLE, type I lipase, type II lipase, and alanine dehydrogenase. In some instances, methods for differentiating between health-associated P. acnes and disease-associated P. acnes comprise differentiation based on ribotype. Also provided herein are methods of differentiating between health-associated P. acnes and disease-associated P. acnes comprising quantitative PCR or sequencing of at least one genetic marker, such as, deoR, Cas5, pIMPLE, type I lipase, type II lipase, alanine dehydrogenase, or a combination thereof. In some cases, methods comprise differentiating between strains and/or ribotypes of P. acnes bacteria. As a non-limiting example, P. acnes RT6 comprises a DNA-binding response regulator and/or phosphoglycerate kinase, which is absent in RT1, RT2, RT3, RT4, and RT5. As another example, an ABC transporter gene is absent from RT6 and present in RT1, RT2, RT3, RT4, and RT5. In some cases, such methods are used to select for bacteria for use in a probiotic described herein. For example, RT6 is not present in a probiotic. In some cases, such methods are used to monitor treatment of an individual with the probiotic. Moreover, in some cases, the methods are used to distinguish between a health-associated and disease-associated bacteria of the same ribotype. For example, P. acnes RT1 has both a disease-associated and health-associated P. acnes that are distinguishable based on the presence and/or absence of genetic markers.

[0219] Methods of diagnosing and/or monitoring treatment of a disease in an individual comprising quantifying health-associated and/or disease-associated P. acnes in a sample from the individual are also provided. Certain methods for quantification as provided herein comprise measuring at least one of deoR, a CRISPR-associated protein, pIMPLE, type I lipase, type II lipase, alanine dehydrogenase, DNA-binding response regulator, phosphoglycerate kinase, and ABC transporter. 23S ribosomal RNA may be measured to determine quantity of total bacteria in a sample. In some embodiments, the treatment comprises administration of a health-associated microbe or probiotic provided herein. As a non-limiting example, the probiotic comprises a P. acnes of RT1 and RT2. In some cases, the probiotic does not comprise a P. acnes of RT6.

[0220] Further provided herein are methods for determining a microbiome profile in an individual by detecting and/or quantifying at least one of deoR, a CRISPR-associated protein, pIMPLE, type I lipase, type II lipase, alanine dehydrogenase, DNA-binding response regulator, phosphoglycerate kinase, and ABC transporter in a sample from the individual. For determining relative quantities of bacteria in a sample, 23S ribosomal RNA sequences may be used to estimate total bacteria in a sample from the individual. Determination of a microbiome profile may be useful before and/or during treatment, for example, treatment with a probiotic or health-associated bacteria, such as P. acnes. Methods for monitoring a treatment regimen following determination of a microbiome profile are also provided.

[0221] Further provided are methods of diagnosing or characterizing acne or other skin disorders in an individual. Such methods may be combined with the probiotics and bacterial compositions provided herein to assess for suitability for treatment and/or treatment monitoring. In certain embodiments, the disease is acne. In certain embodiments, the skin disorder is acne, eczema, psoriasis, seborrheic dermatitis, rosacea, autoimmune disease, lichen sclerosis, lichen planus, pruritus, prurigo nodularis, lichen simplex chronicus, or a combination thereof. In certain embodiments, an individual is diagnosed with acne if the individual is determined to possess a pathogenic strain of Propionibacterium acnes (P. acnes), Staphylococcus, or Malassezia fungi. In certain embodiments, the pathogenic strain of P. acnes comprises a ribotype (RT) that is associated with acne. In certain embodiments, the acne associated strain of P. acnes is of a ribotype selected from RT1, RT 4, RT5, RT7, RT8, RT9, and RT10. In certain embodiments, the acne associated strain of P. acnes is of a ribotype selected from RT 4, RT5, and RT8. In certain embodiments, the methods comprise diagnosing the individual with acne if a presence of Staphylococcus bacteria is detected in a sample of the subject. In certain embodiments, the methods comprise diagnosing the individual with acne if a presence of Malassezia fungi is detected in a sample of the subject.

[0222] In certain embodiments, the disclosure provides a method comprising: obtaining a skin sample from a subject; optionally isolating bacterial DNA from the sample; using one or more primer sets to amplify the DNA; and analyzing the amplified DNA for the presence of a sequence having at least 95% homology with at least one of SEQ ID NOs 1-10, 29-32 and 82-434, wherein the subject is diagnosed as having acne if the presence of a sequence having at least 95% homology with at least one of SEQ ID NOs 1-10, 29-32 and 82-434 exists. For example, the amplified DNA may be analyzed for the presence of a sequence having at least 99% homology with at least one of SEQ ID NOs 1-10, 29-32 and 82-434 and wherein the subject is diagnosed as having acne if the presence of a sequence having at least 99% homology with at least one of SEQ ID NOs 1-10, 29-32 and 82-434 exists. As another example, the amplified DNA may be analyzed for the presence of at least one of SEQ ID NOs 1-10, 29-32 and 82-434 and wherein the subject is diagnosed as having acne if the presence of at least one of SEQ ID NOs 1-10, 29-32 and 82-434 exists.

[0223] In certain embodiments, methods comprise detecting or characterizing a microbe in a sample of a subject. In some embodiments, the methods comprise detecting the microbe in an ex vivo sample. In some embodiments, the methods comprise detecting the microbe in an in vivo sample. An exemplary method comprises: obtaining a stool sample from the subject; isolating bacterial DNA from the sample; amplifying DNA selected from 16S, ribosomal DNA, 18S ribosomal DNA, and/or 23S ribosomal DNA, sequencing the amplified DNA products; and typing the individual's gut bacteria. In certain embodiments, are methods for determining whether a subject has acne comprising: obtaining a stool sample from the subject; isolating bacterial DNA from the sample and whole genome shotgun sequencing DNA in the sample. Another exemplary method comprises obtaining a swab of skin sample from the subject, such as from the face, back or other affected area.

### Biological Samples for Diagnosis

[0224] In certain embodiments, diagnosing an individual comprises obtaining a biological sample. In certain embodiments, the biological sample is a skin sample or biopsy. In certain embodiments, the biological sample is a stool or fecal sample. In certain embodiments, the biological sample is an oral or oral mucosal sample. In certain embodiments, the biological sample is a swab, obtained using a cotton swab or other compatible swab. In certain embodiments, the sample contains bacteria. In certain embodiments, the sample contains a fungus. In certain embodiments, the sample contains a virus. In certain embodiments, the virus is a bacteriophage. In certain embodiments, the sample is stored after it has been collected, but before additional steps are performed. In certain embodiments, storage occurs at less than 8° C. In certain embodiments, storage occurs at less than 4° C. In certain embodiments, storage occurs at less than 0° C. In certain embodiments, storage occurs at less than −20° C. In certain embodiments, storage occurs at less than −70° C. In certain embodiments, this storage is in glycerol, glycol, dimethyl sulfoxide, growth media, nutrient broth or any combination thereof. In certain embodiments, the sample is stored for at least about 1, 2, 3, 4, 5, 6, or 7 days. In some embodiments, the sample is stored for at least about 1, 2, 3, or 4 weeks. In some embodiments, the sample is stored for at least about 1, 2, 3, 4, 5, 6, 7, 8, 9, 10, 11 or 12 months. In some embodiments, the sample is stored for up to about 1, 2, 3, or 4 weeks. In some embodiments, the sample is stored for up to about 1, 2, 3, 4, 5, 6, 7, 8, 9, 10, 11 or 12 months.

[0225] In some embodiments, a composition disclosed herein is stable at room temperature (−25° C.) for at least about one day. In some embodiments, a composition disclosed herein is stable for at least about three days. In some embodiments, a composition disclosed herein is stable for at least about six days. In some embodiments, a composition disclosed herein is stable for at least about nine days. In some embodiments, a composition disclosed herein is stable for at least about twelve days.

[0226] In some embodiments, compositions disclosed herein possess therapeutic activity when applied to skin with a skin disorder. In some embodiments, compositions disclosed herein possess an initial therapeutic activity at the time the composition is produced or packaged. In some embodiments, a composition disclosed herein maintains its initial therapeutic activity at room temperature (−25° C.) for at least about one day. In some embodiments, a composition disclosed herein maintains its initial therapeutic activity for at least about three days. In some embodiments, a composition disclosed herein maintains its initial therapeutic activity for at least about six days. In some embodiments, a composition disclosed herein maintains its initial therapeutic activity for at least about nine days. In some embodiments, a composition disclosed herein maintains its initial therapeutic activity for at least about twelve days.

[0227] In some embodiments, a composition disclosed herein maintains at least about 90% of its initial therapeutic activity at room temperature (−25° C.) for at least about one day. In some embodiments, a composition disclosed herein maintains at least about 90% of its initial therapeutic activity for at least about three days. In some embodiments, a composition disclosed herein maintains at least about 90% of its initial therapeutic activity for at least about six days. In some embodiments, a composition disclosed herein maintains at least about 90% of its initial therapeutic activity for at least about nine days. In some embodiments, a composition disclosed herein maintains at least about 90% of its initial therapeutic activity for at least about twelve days.

[0228] In some embodiments, a composition disclosed herein maintains at least about 80% of its initial therapeutic activity at room temperature (−25° C.) for at least about one day. In some embodiments, a composition disclosed herein maintains at least about 80% of its initial therapeutic activity for at least about three days. In some embodiments, a composition disclosed herein maintains at least about 80% of its initial therapeutic activity for at least about six days. In some embodiments, a composition disclosed herein maintains at least about 80% of its initial therapeutic activity for at least about nine days. In some embodiments, a composition disclosed herein maintains at least about 80% of its initial therapeutic activity for at least about twelve days.

[0229] In some embodiments, a composition disclosed herein maintains at least about 70% of its initial therapeutic activity at room temperature (−25° C.) for at least about one day. In some embodiments, a composition disclosed herein maintains at least about 70% of its initial therapeutic activity for at least about three days. In some embodiments, a composition disclosed herein maintains at least about 70% of its initial therapeutic activity for at least about six days. In some embodiments, a composition disclosed herein maintains at least about 70% of its initial therapeutic activity for at least about nine days. In some embodiments, a composition disclosed herein maintains at least about 70% of its initial therapeutic activity for at least about twelve days.

[0230] In some embodiments, a composition disclosed herein maintains at least about 50% of its initial therapeutic activity at room temperature (−25° C.) for at least about one day. In some embodiments, a composition disclosed herein maintains at least about 50% of its initial therapeutic activity for at least about three days. In some embodiments, a composition disclosed herein maintains at least about 50% of its initial therapeutic activity for at least about six days. In some embodiments, a composition disclosed herein maintains at least about 50% of its initial therapeutic activity for at least about nine days. In some embodiments, a composition disclosed herein maintains at least about 50% of its initial therapeutic activity for at least about twelve days.

[0231] In some embodiments, the sample is cultured at a physiological temperature suitable for bacterial growth such as 30° C., 31° C., 32° C., 33° C., 34° C., 35° C., 36° C., 37° C., 38° C., 39° C. or 40° C. In some embodiments, the sample is cultured at about 35° C. to about 39° C. In some embodiments, the sample is cultured at about 36° C. to about 38° C. In some embodiments, the sample is cultured in a liquid growth media. In some embodiments, the sample is cultured on a solid growth media such as an agar plate. In some embodiments, the plates are blood agar.

[0232] In certain embodiments, samples disclosed herein are processed further before analysis. In some embodiments, no extraction or processing procedures are performed on the sample. In some embodiments, nucleic acid is extracted from the sample. In some embodiments, the nucleic acid is DNA. In some embodiments, the DNA is bacterial DNA. In some embodiments, the Bacterial DNA is 16S ribosomal DNA. In some embodiments, the Bacterial DNA is 18S ribosomal DNA. In some embodiments, the Bacterial DNA is 23S ribosomal DNA. In some embodiments, the nucleic acid is ribosomal DNA. In some embodiments, the nucleic acid is RNA. In some embodiments, the nucleic acid is ribosomal RNA. In certain embodiments, the nucleic acid is extracted using any technique that does not interfere with subsequent analysis. In certain embodiments, this technique uses alcohol precipitation using ethanol, methanol or isopropyl alcohol. In certain embodiments, this technique uses phenol, chloroform, or any combination thereof. In certain embodiments, this technique uses cesium chloride. In certain embodiments, this technique uses sodium, potassium or ammonium acetate or any other salt commonly used to precipitate DNA. In certain embodiments, this technique utilizes a column or resin based nucleic acid purification scheme such as those commonly sold commercially, one non-limiting example would be the GenElute Bacterial Genomic DNA Kit available from Sigma Aldrich. In certain embodiments, after extraction the nucleic acid is stored in water, Tris buffer, or Tris-EDTA buffer before subsequent analysis. In certain embodiments, this storage is less than 8° C. In certain embodiments, this storage is less than 4° C. In certain embodiments, this storage is less than 0° C. In certain embodiments, this storage is less than −20° C. In certain embodiments, this storage is less than −70° C. In certain embodiments, the nucleic acid is stored for 1, 2, 3, 4, 5, 6, or 7 days. In some embodiments, the nucleic acid is stored for 1, 2, 3, or 4 weeks. In some embodiments, the nucleic acid is stored for 1, 2, 3, 4, 5, 6, 7, 8, 9, 10, 11 or 12 months.

[0233] After the samples have been obtained and the relevant nucleic acids isolated the nucleic acids are sequenced. In certain embodiments, the nucleic acid sequenced is bacterial DNA. In certain embodiments, the nucleic acid sequence is bacterial 16S ribosomal DNA. In certain embodiments, the nucleic acid sequence is bacterial 18S ribosomal DNA. In certain embodiments, the nucleic acid sequence is bacterial 23S ribosomal DNA. In certain embodiments, the nucleic acid sequenced is bacteriophage DNA. In certain embodiments, the sequence is determined using PCR. In certain embodiments, at least one primer used in the PCR has a sequence that corresponds to SEQ ID NO: 11, SEQ ID NO: 12, SEQ ID NO: 13, SEQ ID NO: 14, SEQ ID NO: 15, SEQ ID NO: 16, SEQ ID NO: 17, SEQ ID NO: 18, SEQ ID NO: 19, SEQ ID NO: 20, SEQ ID NO: 21, SEQ ID NO: 22, SEQ ID NO: 23, SEQ ID NO: 24, SEQ ID NO: 25, SEQ ID NO: 26, SEQ ID NO: 27 or SEQ ID NO: 28. In certain embodiments, the PCR used is quantitative. In certain embodiments, the PCR reaction utilizes a Taqman™ or a similar quantitative PCR technology. In certain embodiments, the sequencing is performed using the Sanger sequencing method. In certain embodiments, the sequencing involves the use of chain terminating dideoxynucleotides. In certain embodiments, the sequencing involves gel-electrophoresis. In certain embodiments, the sequencing is performed using a next generation sequencing method. In certain embodiments, the method is pyrosequencing. In certain embodiments, the method is ion semiconductor sequencing. In certain embodiments, the method is sequencing by synthesis. In certain embodiments, the method is sequencing by ligation. In certain embodiments, the method is single molecule real time sequencing.

[0234] After the nucleic acids are sequenced, in certain embodiments, described herein diagnosis is made. In certain, embodiments, diagnosis requires the use of a computer, statistical analysis, statistical analysis software, sequence analysis software, or any combination thereof. In certain embodiments, different organisms are identified. In certain embodiments, Malassezia fungi are identified. In certain embodiments, different strains of bacteria are identified during compiling of the microbiome. In certain embodiments, Staphylococcus bacteria are identified. In certain embodiments, different strains of P. acnes are identified during compiling of the microbiome. In certain embodiments, different strains of P. acnes are identified based upon their 16S ribosomal sequence or ribotype. In certain embodiments, P. acnes are identified as belonging to RT1-RT10. In certain embodiments, the P. acnes are identified as belonging to RT1, RT2, RT3, RT6, or any combination thereof. In further embodiments, a diagnostic report may be sent through or accessed by the internet. A diagnostic report may be sent through the mail to a health care provider, physician, or patient.

[0235] In certain embodiments, this disclosure provides a method for determining the presence of antibiotic resistant bacteria in an individual with acne comprising, obtaining a skin sample from an individual, isolating bacterial DNA from the sample, amplifying the relevant regions of the 16S, 18S or 23S ribosomal RNA from the sample, sequencing the amplified DNA products and determining antibiotic resistance to tetracycline and erythromycin/clindamycin classes of antibiotics respectively. In certain embodiments, bacteria present on or isolated from an individual's skin is tested or determined to be resistant to antibiotics. In certain embodiments, the antibiotic is erythromycin. In certain embodiments, the antibiotic is clindamycin. In certain embodiments, antibiotic resistance is determined from the sequence of the 16S, 18S or 23S ribosomal subtype.

### Methods of Preserving Preparations of Propionibacterium

[0236] Provided herein, in some aspects, are methods of producing desired preparations of Propionibacterium. In some embodiments, the methods comprise producing a desired preparation of at least one strain of Propionibacterium. In some embodiments, the at least one strain is a strain of P. acnes. In some embodiments, the at least one strain is not a strain of P. acnes subsp. acnes. In some embodiments, the at least one strain is a strain of P. avidum. In some embodiments, the at least one strain is a strain of P. granulosum. In some embodiments, the at least one strain is a strain of P. acnes subsp. defendens. In preferred embodiments, the strain of Propionibacterium is a health-associated strain, as described herein.

[0237] In some embodiments, methods comprise adding a sample of the Propionibacterium to a glycerol solution to produce a Propionibacterium glycerol stock, and storing the Propionibacterium glycerol stock at a temperature of about 4° C. or less. Producing a desired preparation of Propionibacterium may comprise at least one of cooling, freezing, and storing a Propionibacterium sample, a composition thereof or a stock thereof.

[0238] By way of non-limiting example, methods are provided herein for producing a desired preparation of a P. acnes bacteria comprising adding a sample of the Propionibacterium to a glycerol solution to produce a Propionibacterium glycerol stock, and storing the Propionibacterium glycerol stock at a temperature of about 4° C. or less, wherein more than about 50% of the Propionibacterium bacteria is viable when the Propionibacterium bacteria in the glycerol solution is brought to ambient temperature.

[0239] Also by way of non-limited examples, methods are provided herein for producing a desired preparation of preserved Propionibacterium, wherein about 90% of said Propionibacterium is viable after sixty days of storage, said method comprising: adding a sample of Propionibacterium to a solution of about 50% glycerol to produce a Propionibacterium stock, freezing the Propionibacterium glycerol stock at −20° C., thereby forming said desired preparation wherein greater than about 90% of the sample of Propionibacterium are viable after a thawing of the Propionibacterium glycerol stock.

[0240] In some embodiments, methods comprise storing the Propionibacterium, wherein at least about 1% of the Propionibacterium is viable when the Propionibacterium in the glycerol solution is brought to ambient temperature. In some embodiments, methods comprise storing the Propionibacterium, wherein at least about 5% of the Propionibacterium is viable when the Propionibacterium in the glycerol solution is brought to ambient temperature. In some embodiments, methods comprise storing the Propionibacterium, wherein at least about 10% of the Propionibacterium is viable when the Propionibacterium in the glycerol solution is brought to ambient temperature. In some embodiments, methods comprise storing the Propionibacterium, wherein at least about 15% of the Propionibacterium is viable when the Propionibacterium in the glycerol solution is brought to ambient temperature. In some embodiments, methods comprise storing the Propionibacterium, wherein at least about 20% of the Propionibacterium is viable when the Propionibacterium in the glycerol solution is brought to ambient temperature. In some embodiments, methods comprise storing the Propionibacterium, wherein at least about 30% of the Propionibacterium is viable when the Propionibacterium in the glycerol solution is brought to ambient temperature. In some embodiments, methods comprise storing the Propionibacterium, wherein at least about 40% of the Propionibacterium is viable when the Propionibacterium in the glycerol solution is brought to ambient temperature. In some embodiments, methods comprise storing the Propionibacterium, wherein at least about 50% of the Propionibacterium is viable when the Propionibacterium in the glycerol solution is brought to ambient temperature. In some embodiments, at least about 60% of the Propionibacterium is viable when the Propionibacterium in the glycerol solution is brought to ambient temperature. In some embodiments, at least about 70% of the Propionibacterium is viable when the Propionibacterium in the glycerol solution is brought to ambient temperature. In some embodiments, at least about 80% of the P. acnes bacteria is viable when the Propionibacterium in the glycerol solution is brought to ambient temperature. In some embodiments, more than about 90% of the Propionibacterium are viable when the Propionibacterium in the glycerol solution is brought to ambient temperature.

[0241] In some embodiments, methods comprise adding the Propionibacterium to a glycerol solution, wherein the glycerol solution is between about 5% and about 75% glycerol. In some embodiments, methods comprise adding the Propionibacterium to a glycerol solution, wherein the glycerol solution is between about 5% and about 65% glycerol. In some embodiments, methods comprise adding the Propionibacterium to a glycerol solution, wherein the glycerol solution is between about 5% and about 55% glycerol. In some embodiments, methods comprise adding the Propionibacterium to a glycerol solution, wherein the glycerol solution is between about 5% and about 45% glycerol. In some embodiments, methods comprise adding the Propionibacterium to a glycerol solution, wherein the glycerol solution is between about 5% and about 35% glycerol. In some embodiments, methods comprise adding the Propionibacterium to a glycerol solution, wherein the glycerol solution is between about 5% and about 25% glycerol. In some embodiments, methods comprise adding the Propionibacterium to a glycerol solution, wherein the glycerol solution is between about 25% and about 75% glycerol. In some embodiments, the glycerol solution is between about 30% and about 70% glycerol. In some embodiments, the glycerol solution is between about 35% and about 65% glycerol. In some embodiments, the glycerol solution is between about 40% and about 60% glycerol. In some embodiments, the glycerol solution is between about 45% and about 50% glycerol. In some embodiments, the glycerol solution is about 25% glycerol. In some embodiments, the glycerol solution is about 30% glycerol. In some embodiments, the glycerol solution is about 35% glycerol. In some embodiments, the glycerol solution is about 40% glycerol. In some embodiments, the glycerol solution is about 45% glycerol. In some embodiments, the glycerol solution is about 50% glycerol. In some embodiments, the glycerol solution is about 55% glycerol. In some embodiments, the glycerol solution is about 60% glycerol.

[0242] In some embodiments, methods comprise storing Propionibacterium, or a composition thereof, disclosed herein, at a selected temperature. In some embodiments, methods comprise storing the Propionibacterium glycerol stock at a selected temperature. In some embodiments, the temperature is between about 30° C. and about −80° C. In some embodiments, the temperature is between about 25° C. and about −80° C. In some embodiments, the temperature is between about 25° C. and about −20° C. In some embodiments, the temperature is between about 30° C. and about 4° C. In some embodiments, the temperature is between about 10° C. and about −80° C. In some embodiments, the temperature is between about 10° C. and about −40° C. In some embodiments, the temperature is between about 10° C. and about −30° C. In some embodiments, the temperature is between about 10° C. and about −20° C. In some embodiments, the temperature is between about 4° C. and about −80° C. In some embodiments, the temperature is between about 4° C. and about −25° C. In some embodiments, the temperature is between about 4° C. and about −20° C. In some embodiments, the temperature is about 22° C. to about 28° C. In some embodiments, the temperature is about 25° C. In some embodiments, the temperature is about 4° C. In some embodiments, the temperature is about −20° C. In some embodiments, the temperature is between about −80° C.

[0243] In some embodiments, methods comprise thawing a composition of Propionibacterium disclosed herein. In some embodiments, methods comprise warming a composition of Propionibacterium bacteria disclosed herein. In some embodiments, methods comprise thawing a Propionibacterium glycerol stock at room temperature. In some embodiments, methods comprise rapid thawing the Propionibacterium glycerol stock in a bath. The bath temperature may be between about 25° C. and about 40° C. In some embodiments, methods comprise rapidly thawing a composition of Propionibacterium bacteria disclosed herein. By way of non-limiting example, a subject may apply a composition disclosed herein, wherein the composition is frozen, directly to skin. In some embodiments, methods comprise slowly thawing a composition of Propionibacterium bacteria disclosed herein. By way of non-limiting example, a subject may transfer a composition disclosed herein that is frozen to a refrigerator to reach a refrigerated temperature before being brought to room temperature, before being applied to skin, or before being combined with another composition (e.g., emollient, lotion, gel). The term “frozen” includes compositions at temperatures at which the composition is in a solid form or semi-solid form. Frozen may include compositions at temperatures of less than 0° C., and less than −15° C. The term “refrigerated temperature” refers to a temperature of about 0° C. to about 10° C., e.g., 4° C. A refrigerated temperature does not necessarily need to be achieved with a refrigerator. By non-limiting example, an ice bucket could similarly cool a sample.

[0244] In some embodiments, methods comprise storing a Propionibacterium glycerol stock, wherein at least about 60% to at least about 90% of the Propionibacterium sample is viable after the Propionibacterium glycerol stock is brought to ambient temperature. In some embodiments, the at least about 70% to at least about 90% of the P. acnes sample is viable after the Propionibacterium glycerol stock is brought to ambient temperature. In some embodiments, the at least about 80% to at least about 90% of the viable after the Propionibacterium glycerol stock is brought to ambient temperature. In some embodiments, at least about 60% of Propionibacterium sample is viable after the Propionibacterium glycerol stock is brought to ambient temperature. In some embodiments, at least about 70% of the P. acnes sample is viable after the Propionibacterium glycerol stock is brought to ambient temperature. In some embodiments, at least about 80% of the Propionibacterium sample is viable after the Propionibacterium glycerol stock is brought to ambient temperature. In some embodiments, at least about 90% of the P. acnes sample is viable after the Propionibacterium glycerol stock is brought to ambient temperature. Ambient temperature is considered an acceptable room temperature. In some embodiments, the ambient temperature is between about 25° C. and about 35° C. In some embodiments, the ambient temperature is between about 20° C. and about 30° C. In some embodiments, the ambient temperature is between about 22° C. and about 28° C. In some embodiments, the ambient temperature is about 25° C.

[0245] In some embodiments, methods comprise storing a Propionibacterium glycerol stock, wherein at least about 50% of the Propionibacterium sample is viable after at least about 30 days of storing. In some embodiments, at least about 60% of the Propionibacterium sample is viable after at least about 30 days of storing. In some embodiments, at least about 70% of the Propionibacterium sample is viable after at least about 20 days of storing. In some embodiments, at least about 80% of the Propionibacterium sample is viable after at least about 30 days of storing. In some embodiments, at least about 90% of the Propionibacterium sample is viable after at least about 30 days of storing. In some embodiments, at least about 95% of the Propionibacterium sample is viable after at least about 30 days of storing. In some embodiments, at least about 50% of the Propionibacterium sample is viable after at least about 60 days of storing. In some embodiments, at least about 60% of the Propionibacterium sample is viable after at least about 60 days of storing. In some embodiments, at least about 70% of the P. acnes sample is viable after at least about 60 days of storing. In some embodiments, at least about 80% of the Propionibacterium sample is viable after at least about 60 days of storing. In some embodiments, at least about 90% of the Propionibacterium sample is viable after at least about 60 days of storing. In some embodiments, at least about 95% of the Propionibacterium sample is viable after at least about 60 days of storing. In some embodiments, at least about 50% of the Propionibacterium sample is viable after at least about 90 days of storing. In some embodiments, at least about 60% of the Propionibacterium sample is viable after at least about 90 days of storing. In some embodiments, at least about 70% of the Propionibacterium sample is viable after at least about 90 days of storing. In some embodiments, at least about 80% of the Propionibacterium sample is viable after at least about 90 days of storing. In some embodiments, at least about 90% of the Propionibacterium sample is viable after at least about 90 days of storing. In some embodiments, at least about 95% of the Propionibacterium sample is viable after at least about 90 days of storing. In some embodiments, at least about 50% of the Propionibacterium sample is viable after at least about 120 days of storing. In some embodiments, at least about 60% of the Propionibacterium sample is viable after at least about 120 days of storing. In some embodiments, at least about 70% of the Propionibacterium sample is viable after at least about 120 days of storing. In some embodiments, at least about 80% of the Propionibacterium sample is viable after at least about 120 days of storing. In some embodiments, at least about 90% of the Propionibacterium sample is viable after at least about 120 days of storing. In some embodiments, at least about 95% of the Propionibacterium sample is viable after at least about 120 days of storing. In some embodiments, at least about 50% of the Propionibacterium sample is viable after at least about 180 days of storing. In some embodiments, at least about 60% of the Propionibacterium sample is viable after at least about 180 days of storing. In some embodiments, at least about 70% of the sample is viable after at least about 180 days of storing. In some embodiments, at least about 80% of the Propionibacterium sample is viable after at least about 180 days of storing. In some embodiments, at least about 90% of the Propionibacterium sample is viable after at least about 180 days of storing. In some embodiments, at least about 95% of the Propionibacterium sample is viable after at least about 180 days of storing. In some embodiments, at least about 50% of the Propionibacterium sample is viable after at least about a year of storing. In some embodiments, at least about 60% of the Propionibacterium sample is viable after at least about a year of storing. In some embodiments, at least about 70% of the Propionibacterium sample is viable after at least about a year of storing. In some embodiments, at least about 80% of the Propionibacterium sample is viable after at least about a year of storing. In some embodiments, at least about 90% of the Propionibacterium sample is viable after at least about a year of storing. In some embodiments, at least about 95% of the Propionibacterium sample is viable after at least about a year of storing.

[0246] In some embodiments, methods comprise storing Propionibacterium in a solution, wherein the solution is between about 10% glycerol v/v and about 90% glycerol v/v in solution. In some embodiments, the solution is between about 20% glycerol v/v and about 80% glycerol v/v in solution. In some embodiments, the solution is between about 25% glycerol v/v and about 75% glycerol v/v in solution. In some embodiments, the solution is between about 30% glycerol v/v and about 70% glycerol v/v in solution. In some embodiments, the solution is between about 35% glycerol v/v and about 65% glycerol v/v in solution. In some embodiments, the solution is between about 40% glycerol v/v and about 60% glycerol v/v in solution. In some embodiments, the solution is between about 45% glycerol v/v and about 55% glycerol v/v in solution. In some embodiments, the solution is between about 15% glycerol v/v and about 35% glycerol v/v in solution. In some embodiments, the solution is between about 20% glycerol v/v and about 30% glycerol v/v in solution. In some embodiments, the solution is about 20% glycerol v/v in solution. In some embodiments, the solution is about 25% glycerol v/v in solution. In some embodiments, the solution is about 30% glycerol v/v in solution. In some embodiments, the solution is about 35% glycerol v/v in solution. In some embodiments, the solution is about 40% glycerol v/v in solution. In some embodiments, the solution is about 45% glycerol v/v in solution. In some embodiments, the solution is about 50% glycerol v/v in solution. In some embodiments, the solution is about 50% glycerol v/v in solution. In some embodiments, the solution is about 55% glycerol v/v in solution. In some embodiments, the solution is about 60% glycerol v/v in solution. In some embodiments, the solution is about 65% glycerol v/v in solution. In some embodiments, the solution is about 75% glycerol v/v in solution.

[0247] In some embodiments, methods comprise storing Propionibacterium bacteria in a solution, wherein the solution comprises glycerol and water. In some embodiments, the solution consists essentially of glycerol and water. In some embodiments, methods comprise storing Propionibacterium in a solution, wherein the solution comprises glycerol and a saline solution. In some embodiments, the solution consists essentially of glycerol and a saline solution. In some embodiments, the solution comprises glycerol and a buffered saline solution. In some embodiments, the solution consists essentially of glycerol and a buffered saline solution. In some embodiments, the solution comprises glycerol and a buffered solution. In some embodiments, the buffered solution comprises sodium bicarbonate, citric acid or triethanolamine. In some embodiments, the solution comprises glycerol and a phosphate buffered saline solution. In some embodiments, the solution consists essentially of glycerol and a phosphate buffered saline solution.

[0248] In some embodiments, methods comprise storing Propionibacterium in a solution, wherein the solution has a pH of between about 3.5 and about 7. In some embodiments, the solution has a pH of between about 4 and about 6.5. In some embodiments, the solution has a pH of between about 4 and about 6. In some embodiments, the solution has a pH of between about 4 and about 5.5. In some embodiments, the solution has a pH of between about 4.5 and about 5.5. In some embodiments, the solution has a pH of between about 4.8 and about 5. In some embodiments, the solution has a pH of about 4. In some embodiments, the solution has a pH of about 4.2. In some embodiments, the solution has a pH of about 4.4. In some embodiments, the solution has a pH of about 4.6. In some embodiments, the solution has a pH of about 4.8. In some embodiments, the solution has a pH of about 5. In some embodiments, the solution has a pH of about 5.2. In some embodiments, the solution has a pH of about 5.4. In some embodiments, the solution has a pH of about 5.6. In some embodiments, the solution has a pH of about 5.8. In some embodiments, the solution has a pH of about 6.

[0249] In some embodiments, methods comprise storing Propionibacterium in a solution, wherein the solution comprises a salt or ion thereof. In some embodiments, the solution comprises an ion selected from potassium, calcium, magnesium, sodium, and boron. In some embodiments, the solution comprises potassium. In some embodiments, the solution comprises potassium. In some embodiments, the concentration of the salt or ion thereof is between about 0.001 mM and about 1 mM. In some embodiments, the concentration of the salt or ion thereof is between about 0.001 mM and about 0.1 mM. In some embodiments, the concentration of the salt or ion thereof is between about 0.01 mM and about 0.1 mM. In some embodiments, the concentration of the salt or ion thereof is between about 0.05 mM and about 0.1 mM. In some embodiments, the concentration of the salt or ion thereof is between about 0.01 mM and about 1 mM. In some embodiments, the concentration of the salt or ion thereof is between about 0.1 mM and about 1 mM. In some embodiments, the concentration of the salt or ion thereof is between about 100 mM and about 250 mM. In some embodiments, the concentration of the salt or ion thereof is between about 125 mM and about 225 mM. In some embodiments, the concentration of the salt or ion thereof is between about 150 mM and about 200 mM. In some embodiments, the concentration of potassium is between about 100 mM and about 250 mM. In some embodiments, the concentration of potassium is between about 125 mM and about 225 mM. In some embodiments, the concentration of potassium is between about 150 mM and about 200 mM. In some embodiments, the solution comprises calcium at a concentration of about 0.001 mM to about 1 mM. In some embodiments, the solution comprises calcium at a concentration of about 0.01 mM to about 0.5 mM. In some embodiments, the solution comprises calcium at a concentration of about 0.05 mM to about 0.1 mM.

[0250] In some embodiments, methods comprise storing Propionibacterium in a solution, wherein the solution comprises a prebiotic stabilizing agent. In some embodiments, the prebiotic stabilizing agent is selected from a polysaccharide or oligosaccharide. In some embodiments, the prebiotic stabilizing agent is inulin. In some embodiments, the stabilizing agent is present in the solution at a concentration of about 0.01% v/v to about 1% v/v. In some embodiments, the stabilizing agent is present in the solution at a concentration of about 0.01% v/v to about 0.5% v/v. In some embodiments, the stabilizing agent is present in the solution at a concentration of about 0.05% v/v to about 0.2% v/v. In some embodiments, the solution comprises inulin at a concentration of about 0.01% v/v to about 1% v/v. In some embodiments, the solution comprises inulin at a concentration of about 0.01% v/v to about 0.5% v/v. In some embodiments, the solution comprises inulin at a concentration of about 0.05% v/v to about 0.2% v/v. For clarity, the term % v/v, as used herein, represent the percentage of a total volume of a solution that is represented by a volume of a component of the solution.

[0251] In some embodiments, methods comprise storing Propionibacterium in a solution, wherein the solution comprises an anti-acne agent, wherein the anti-acne agent is an agent that prevents, reduces or abolishes acne. In some embodiments, the anti-acne agent is selected from a retinoid, a vitamin, an antioxidant, a peroxide, an acid, an oil, an alcohol, an extract, and analogs thereof. For clarity, the term, “analog,” as used herein, refers to a compound having a structure similar to that of another one, but differing from it by less than about 10% of the total structure. In some embodiments, the retinoid is selected from tretinoin, tazarotene, adapalene, and retinol. In some embodiments, the vitamin or analog thereof is selected from a Vitamin A, Vitamin C, Vitamin D, Vitamin E, and calciptotriene. In some embodiments, the antioxidant is selected from Vitamin C and Vitamin E. peroxide is benzoyl peroxide. In some embodiments, the acid is selected from salicylic acid, azaelic acid, trichloracetic acid, and glycolic acid. In some embodiments, the alcohol is selected from cetyl alcohol, stearyl alcohol, and cetearyl alcohol. In some embodiments, the alcohol is selected from retinol (also known as Vitamin A₁) and resveratrol. In some embodiments, the oil is selected from lavender oil, clary sage oil, juniper berry oil, bergamot oil, jojoba oil, rosemary oil, coconut oil, avocado oil, peppermint oil, and tea tree oil. In some embodiments, the oil is tea tree oil. In some embodiments, the extract is selected from an extract of aloe, garlic, amaranth, neem, coriander, lemon, basil, grapefruit, cucumber, grape, beet, green tea or a combination thereof. In some embodiments, the extract is a green tea extract.

[0252] In some embodiments, methods comprise storing Propionibacterium in a solution, wherein the solution is incorporated in a biologic stability platform. In some embodiments, the biologic stability platform eliminates a need for temperature control, e.g., cold chain storage. In some embodiments, the biologic storage platform comprises foam drying or foam formation of the solution or glycerol stock solution. In some embodiments, the biologic stability platform comprises at least one of a glyconanoparticle, a liposome, a nanoparticle, trehalose, sucrose, stachyose, hydroxyethyl starch, and a combination of glycine and mannitol.

[0253] In some embodiments, methods comprise storing or preserving a sample of P. acnes of at least one selected ribotype. the sample of P. acnes bacteria comprises P. acnes bacteria of ribotype RT1. In some embodiments, the sample of P. acnes bacteria comprises P. acnes bacteria of ribotype RT2. In some embodiments, the sample of P. acnes bacteria comprises P. acnes bacteria of ribotypes RT1 and RT2. In some embodiments, the sample of P. acnes bacteria consists essentially of P. acnes bacteria of ribotype RT1. In some embodiments, the sample of P. acnes bacteria consists essentially of P. acnes bacteria of ribotype RT2. In some embodiments, the sample of P. acnes bacteria consists essentially of P. acnes bacteria of ribotypes RT1 and RT2.

[0254] In some embodiments, methods may comprise culturing an initial culture of the sample of P. acnes bacteria. The initial culture may be a smaller aliquot of the Propionibacterium and the method may comprise proliferating the Propionibacterium to obtain a desired amount. In some embodiments, methods may comprise culturing the initial culture in a culture medium. In some embodiments, the cell culture medium comprises reinforced clostridial medium. In some embodiments, the cell culture medium consists essentially of reinforced clostridial medium. In some embodiments, the cell culture medium comprises Luria broth. In some embodiments, the cell culture medium comprises tryptone broth. In some embodiments, methods comprise at least one step of splitting, diluting or passaging the initial culture or product thereof in the culture medium. In some embodiments, the methods comprise at least one step of washing the sample of the initial culture or product thereof. In some embodiments, the methods comprise at least one step of centrifuging or pelleting the initial culture or product thereof. In some embodiments, the culture is centrifuged at about 3500 rcf to about 4500 rcf. In some embodiments, the culture is centrifuged at about 3800 rcf to about 4200 rcf. In some embodiments, the culture is centrifuged at about 4000 rcf. In some embodiments, the methods comprise at least one step of vortexing the initial culture or product thereof. In some embodiments, the methods comprise at least one step of pipetting the initial culture of product thereof. Any one of the steps described herein may be performed at least one time. Any one of the steps described herein may be performed two times. Any one of the steps described herein may be performed three times. In some embodiments, methods comprise adding a sachet to a culture comprising the sample of Propionibacterium or an initial culture thereof. In some embodiments the sachet reduces oxygen exposure to the Propionibacterium.

### Compositions of Preserved Propionibacterium

[0255] Provided herein, in some aspects, are compositions that comprise a preserved sample of bacteria, wherein the bacteria comprises Propionibacterium. In some embodiments, compositions disclosed herein comprise P. acnes bacteria of ribotype RT1. In some embodiments, the compositions comprise P. acnes bacteria of ribotype RT2. In some embodiments, the compositions comprise P. acnes bacteria of ribotype RT1 and RT2. In some embodiments, the bacteria of the compositions consist essentially of P. acnes bacteria of ribotype RT1. In some embodiments, the bacteria of the compositions consist essentially of P. acnes bacteria of ribotype RT2. In some embodiments, the compositions comprise P. acnes bacteria of ribotype RT1 and RT2.

[0256] In some embodiments, compositions disclosed herein comprise a sample of bacteria preserved in at least one cryopreservative agent. In some embodiments, the cryopreservative agent is a polyol. Non-limiting examples of polyols include DMSO, ethylene glycol, glycerol, propylene (PEG) glycol, sucrose, trehalose, and 2-Methyl-2,4-pentanediol (MPD). In various embodiments, the PEG may have a molecular weight between about 10 g/mol and about 10,000 g/mol. In various embodiments, the PEG may have a molecular weight between about 10 g/mol and about 5,000 g/mol. In various embodiments, the PEG may have a molecular weight between about 10 g/mol and about 1,000 g/mol. In various embodiments, the PEG may have a molecular weight between about 10 g/mol and about 500 g/mol.

[0257] In some embodiments, compositions disclose herein comprise polyethylene glycol. In some embodiments, a composition comprising polyethylene glycol allows for a reduced amount of glycerol, whilst maintaining viability of bacteria in the composition that is similar to viability of bacteria in compositions without polyethylene glycol and a greater amount of glycerol. In some embodiments, reducing or minimizing the amount of glycerol in a composition disclosed herein results in a formulation that has a texture that is more preferable to a subject. In some embodiments, reducing or minimizing the amount of glycerol in a composition disclosed herein results in a formulation that less comedogenic relative to a composition with a greater amount of glycerol.

[0258] In some embodiments, compositions disclosed herein comprise a sample of bacteria preserved in a mixture of a first polyol and a second polyol. In some embodiments, the first polyol or the second polyol is glycerol. In some embodiments, the first polyol or the second polyol is a polyethylene glycol. In some embodiments, compositions disclosed herein comprise a sample of bacteria preserved in a mixture of glycerol and polyethylene glycol. In some embodiments, the mixture is between about 1% glycerol v/v and about 50% glycerol v/v, and between about 1% polyethylene glycol w/v and about 50% w/v polyethylene glycol. In some embodiments, the mixture is between about 5% glycerol v/v and about 50% glycerol v/v, and between about 5% polyethylene glycol w/v and about 50% w/v polyethylene glycol. In some embodiments, the mixture is between about 5% glycerol v/v and about 30% glycerol v/v, and between about 5% polyethylene glycol w/v and about 40% w/v polyethylene glycol. In some embodiments, the mixture is between about 10% glycerol v/v and about 35% glycerol v/v, and between about 10% polyethylene glycol w/v and about 35% w/v polyethylene glycol.

[0259] In some embodiments, compositions disclose herein comprise a solution, wherein the solution is between about 1% glycerol v/v and about 75% glycerol v/v in solution. In some embodiments, the solution is between about 1% glycerol v/v and about 50% glycerol v/v in solution. In some embodiments, the solution is between about 1% glycerol v/v and about 40% glycerol v/v in solution. In some embodiments, the solution is between about 1% glycerol v/v and about 35% glycerol v/v in solution. In some embodiments, the solution is between about 1% glycerol v/v and about 30% glycerol v/v in solution. In some embodiments, the solution is between about 1% glycerol v/v and about 25% glycerol v/v in solution. In some embodiments, the solution is between about 1% glycerol v/v and about 20% glycerol v/v in solution. In some embodiments, the solution is between about 1% glycerol v/v and about 15% glycerol v/v in solution. In some embodiments, the solution is between about 5% glycerol v/v and about 50% glycerol v/v in solution. In some embodiments, the solution is between about 5% glycerol v/v and about 40% glycerol v/v in solution. In some embodiments, the solution is between about 5% glycerol v/v and about 35% glycerol v/v in solution. In some embodiments, the solution is between about 5% glycerol v/v and about 30% glycerol v/v in solution. In some embodiments, the solution is between about 5% glycerol v/v and about 25% glycerol v/v in solution. In some embodiments, the solution is between about 10% glycerol v/v and about 40% glycerol v/v in solution. In some embodiments, the solution is between about 10% glycerol v/v and about 35% glycerol v/v in solution. In some embodiments, the solution is between about 10% glycerol v/v and about 30% glycerol v/v in solution. In some embodiments, the solution is between about 10% glycerol v/v and about 25% glycerol v/v in solution. In some embodiments, the solution is between about 15% glycerol v/v and about 40% glycerol v/v in solution. In some embodiments, the solution is between about 15% glycerol v/v and about 35% glycerol v/v in solution. In some embodiments, the solution is between about 15% glycerol v/v and about 30% glycerol v/v in solution. In some embodiments, the solution is between about 15% glycerol v/v and about 25% glycerol v/v in solution. In some embodiments, the solution is between about 20% glycerol v/v and about 50% glycerol v/v in solution. In some embodiments, the solution is between about 20% glycerol v/v and about 40% glycerol v/v in solution. In some embodiments, the solution is between about 20% glycerol v/v and about 30% glycerol v/v in solution.

[0260] In some embodiments, compositions disclose herein comprise a solution, wherein the solution is between about 1% polyethylene glycol w/v and about 75% polyethylene glycol w/v in solution. In some embodiments, the solution is between about 1% polyethylene glycol w/v and about 50% polyethylene glycol w/v in solution. In some embodiments, the solution is between about 1% polyethylene glycol w/v and about 40% polyethylene glycol w/v in solution. In some embodiments, the solution is between about 1% polyethylene glycol w/v and about 35% polyethylene glycol w/v in solution. In some embodiments, the solution is between about 1% polyethylene glycol w/v and about 30% polyethylene glycol w/v in solution. In some embodiments, the solution is between about 1% polyethylene glycol w/v and about 25% polyethylene glycol w/v in solution. In some embodiments, the solution is between about 1% polyethylene glycol w/v and about 20% polyethylene glycol w/v in solution. In some embodiments, the solution is between about 1% polyethylene glycol w/v and about 15% polyethylene glycol w/v in solution. In some embodiments, the solution is between about 5% polyethylene glycol w/v and about 50% polyethylene glycol w/v in solution. In some embodiments, the solution is between about 5% polyethylene glycol w/v and about 40% polyethylene glycol w/v in solution. In some embodiments, the solution is between about 5% polyethylene glycol w/v and about 35% polyethylene glycol w/v in solution. In some embodiments, the solution is between about 5% polyethylene glycol w/v and about 30% polyethylene glycol w/v in solution. In some embodiments, the solution is between about 5% polyethylene glycol w/v and about 25% polyethylene glycol w/v in solution. In some embodiments, the solution is between about 10% polyethylene glycol w/v and about 40% polyethylene glycol w/v in solution. In some embodiments, the solution is between about 10% polyethylene glycol w/v and about 35% polyethylene glycol w/v in solution. In some embodiments, the solution is between about 10% polyethylene glycol w/v and about 30% polyethylene glycol w/v in solution. In some embodiments, the solution is between about 10% polyethylene glycol w/v and about 25% polyethylene glycol w/v in solution. In some embodiments, the solution is between about 15% polyethylene glycol w/v and about 40% polyethylene glycol w/v in solution. In some embodiments, the solution is between about 15% polyethylene glycol w/v and about 35% polyethylene glycol w/v in solution. In some embodiments, the solution is between about 15% polyethylene glycol w/v and about 30% polyethylene glycol w/v in solution. In some embodiments, the solution is between about 15% polyethylene glycol w/v and about 25% polyethylene glycol w/v in solution. In some embodiments, the solution is between about 20% polyethylene glycol w/v and about 50% polyethylene glycol w/v in solution. In some embodiments, the solution is between about 20% polyethylene glycol w/v and about 40% polyethylene glycol w/v in solution. In some embodiments, the solution is between about 20% polyethylene glycol w/v and about 30% polyethylene glycol w/v in solution.

[0261] In some embodiments, the solution is about 5% glycerol v/v in solution. In some embodiments, the solution is about 10% glycerol v/v in solution. In some embodiments, the solution is about 15% glycerol v/v in solution. In some embodiments, the solution is about 20% glycerol v/v in solution. In some embodiments, the solution is about 25% glycerol v/v in solution. In some embodiments, the solution is about 30% glycerol v/v in solution. In some embodiments, the solution is about 35% glycerol v/v in solution. In some embodiments, the solution is about 40% glycerol v/v in solution. In some embodiments, the solution is about 45% glycerol v/v in solution. In some embodiments, the solution is about 50% glycerol v/v in solution. In some embodiments, the solution is about 55% glycerol v/v in solution. In some embodiments, the solution is about 60% glycerol v/v in solution. In some embodiments, the solution is about 70% glycerol v/v in solution.

[0262] In some embodiments, compositions disclosed herein comprise a solution, wherein the solution comprises glycerol and water. In some embodiments, the solution consists essentially of glycerol and water. In some embodiments, methods comprise storing Propionibacterium in a solution, wherein the solution comprises glycerol and a saline solution. In some embodiments, the solution consists essentially of glycerol and a saline solution. In some embodiments, the solution comprises glycerol and a buffered saline solution. In some embodiments, the solution consists essentially of glycerol and a buffered saline solution. In some embodiments, the solution comprises glycerol and a buffered solution. In some embodiments, the buffered solution comprises sodium bicarbonate, citric acid or triethanolamine. In some embodiments, the solution comprises glycerol and a phosphate buffered saline solution. In some embodiments, the solution consists essentially of glycerol and a phosphate buffered saline solution.

[0263] In some embodiments, compositions disclosed herein comprise a solution, wherein the solution has a pH of between about 3.5 and about 7. In some embodiments, the solution has a pH of between about 4 and about 6.5. In some embodiments, the solution has a pH of between about 4 and about 6. In some embodiments, the solution has a pH of between about 4 and about 5.5. In some embodiments, the solution has a pH of between about 4.5 and about 5.5. In some embodiments, the solution has a pH of between about 4.8 and about 5. In some embodiments, the solution has a pH of about 4. In some embodiments, the solution has a pH of about 4.2. In some embodiments, the solution has a pH of about 4.4. In some embodiments, the solution has a pH of about 4.6. In some embodiments, the solution has a pH of about 4.8. In some embodiments, the solution has a pH of about 5. In some embodiments, the solution has a pH of about 5.2. In some embodiments, the solution has a pH of about 5.4. In some embodiments, the solution has a pH of about 5.6. In some embodiments, the solution has a pH of about 5.8. In some embodiments, the solution has a pH of about 6.

[0264] In some embodiments, compositions disclosed herein comprise a solution, wherein the solution comprises a salt or ion thereof. In some embodiments, the solution comprises an ion selected from potassium, calcium, magnesium, sodium, and boron. In some embodiments, the solution comprises potassium. In some embodiments, the solution comprises potassium. In some embodiments, the concentration of the salt or ion thereof is between about 0.001 mM and about 1 mM. In some embodiments, the concentration of the salt or ion thereof is between about 0.001 mM and about 0.1 mM. In some embodiments, the concentration of the salt or ion thereof is between about 0.01 mM and about 0.1 mM. In some embodiments, the concentration of the salt or ion thereof is between about 0.05 mM and about 0.1 mM. In some embodiments, the concentration of the salt or ion thereof is between about 0.01 mM and about 1 mM. In some embodiments, the concentration of the salt or ion thereof is between about 0.1 mM and about 1 mM. In some embodiments, the concentration of the salt or ion thereof is between about 100 mM and about 250 mM. In some embodiments, the concentration of the salt or ion thereof is between about 125 mM and about 225 mM. In some embodiments, the concentration of the salt or ion thereof is between about 150 mM and about 200 mM. In some embodiments, the concentration of potassium is between about 100 mM and about 250 mM. In some embodiments, the concentration of potassium is between about 125 mM and about 225 mM. In some embodiments, the concentration of potassium is between about 150 mM and about 200 mM. In some embodiments, the solution comprises calcium at a concentration of about 0.001 mM to about 1 mM. In some embodiments, the solution comprises calcium at a concentration of about 0.01 mM to about 0.5 mM. In some embodiments, the solution comprises calcium at a concentration of about 0.05 mM to about 0.1 mM.

[0265] In some embodiments, compositions disclosed herein comprise a solution, wherein the solution comprises at least one stabilizing agent. In some embodiments, the stabilizing agent is selected from inulin, sucrose, trehalose, cornstarch, maltodextrin, guar guy, locust bean gum, and xanthan gum. In some embodiments, trehalose or sucrose stabilizes bacteria for cold-chain free stability. In some embodiments, the stabilizing agent is inulin. In some embodiments, the stabilizing agent is present in the solution at a concentration of about 0.01% v/v to about 1% v/v. In some embodiments, the stabilizing agent is present in the solution at a concentration of about 0.01% v/v to about 0.5% v/v. In some embodiments, the stabilizing agent is present in the solution at a concentration of about 0.05% v/v to about 0.2% v/v. In some embodiments, the solution comprises inulin at a concentration of about 0.01% v/v to about 1% v/v. In some embodiments, the solution comprises inulin at a concentration of about 0.01% v/v to about 0.5% v/v. In some embodiments, the solution comprises inulin at a concentration of about 0.05% v/v to about 0.2% v/v.

[0266] In some embodiments, compositions disclosed herein comprise a solution, wherein the solution comprises an anti-acne agent, wherein the anti-acne agent is an agent that prevents, reduces or abolishes acne. In some embodiments, the anti-acne agent is selected from a retinoid, a vitamin, an antioxidant, a peroxide, an acid, an oil, an alcohol, an extract, and analogs thereof. In some embodiments, the retinoid is selected from tretinoin, tazarotene, adapalene, and retinol. In some embodiments, the vitamin or analog thereof is selected from Vitamin D, Vitamin C, Vitamin E, and calciptotriene. In some embodiments, the antioxidant is selected from Vitamin C and Vitamin E. peroxide is benzoyl peroxide. In some embodiments, the acid is selected from salicylic acid, azaelic acid, trichloracetic acid, and glycolic acid. In some embodiments, the alcohol is selected from retinol and resveratrol. In some embodiments, the oil is tea tree oil. In some embodiments, the extract is a green tea extract.

[0267] In some embodiments, compositions disclosed herein comprise a solution, wherein the solution is incorporated in a biologic stability platform. In some embodiments, the biologic stability platform eliminates a need for temperature control, e.g., cold chain storage. In some embodiments, the biologic storage platform comprises foam drying or foam formation of the solution or glycerol stock solution. In some embodiments, the biologic stability platform comprises at least one of a glyconanoparticle, a liposome, a nanoparticle, trehalose, sucrose, stachyose, hydroxyethyl starch, and a combination of glycine and mannitol.

[0268] In some embodiments, compositions disclosed herein have a temperature of about −80° C. to about 10° C. In some embodiments, the composition is at a temperature of about −80° C. to about 4° C. In some embodiments, the composition is at a temperature of about −40° C. to about 10° C. In some embodiments, the composition is at a temperature of about −25° C. to about 10° C. In some embodiments, the composition is at a temperature of about −20° C. to about 4° C. In some embodiments, the composition is at a temperature of about −90° C. to about −70° C. In some embodiments, the composition is at a temperature of about −30° C. to about −10° C. In some embodiments, the composition is at a temperature of about −80° C. In some embodiments, the composition is at a temperature of about −20° C. In some embodiments, the composition is at a temperature of about 4° C.

[0269] In some embodiments, compositions disclosed herein comprise a Propionibacterium glycerol stock, wherein at least about 60% to at least about 90% of the Propionibacterium sample is viable after the Propionibacterium glycerol stock is brought to ambient temperature. In some embodiments, the at least about 70% to at least about 90% of the Propionibacterium sample is viable after the Propionibacterium glycerol stock is brought to ambient temperature. In some embodiments, the at least about 80% to at least about 90% of the viable after the Propionibacterium glycerol stock is brought to ambient temperature. In some embodiments, at least about 60% of the P. acnes sample is viable after the Propionibacterium glycerol stock is brought to ambient temperature. In some embodiments, at least about 70% of the Propionibacterium sample is viable after the Propionibacterium glycerol stock is brought to ambient temperature. In some embodiments, at least about 80% of the Propionibacterium sample is viable after the Propionibacterium glycerol stock is brought to ambient temperature. In some embodiments, at least about 90% of the Propionibacterium sample is viable after the Propionibacterium glycerol stock is brought to ambient temperature. Ambient temperature is considered an acceptable room temperature. In some embodiments, the ambient temperature is between about 25° C. and about 35° C. In some embodiments, the ambient temperature is between about 20° C. and about 30° C. In some embodiments, the ambient temperature is between about 22° C. and about 28° C. In some embodiments, the ambient temperature is about 25° C.

[0270] In some embodiments, compositions disclosed herein comprise a Propionibacterium glycerol stock, wherein at least about 50% of the Propionibacterium sample is viable after at least about 30 days of storing. In some embodiments, at least about 60% of the Propionibacterium sample is viable after at least about 30 days of storing. In some embodiments, at least about 70% of the P. acnes sample is viable after at least about 20 days of storing. In some embodiments, at least about 80% of the Propionibacterium sample is viable after at least about 30 days of storing. In some embodiments, at least about 90% of the Propionibacterium sample is viable after at least about 30 days of storing. In some embodiments, at least about 95% of the Propionibacterium sample is viable after at least about 30 days of storing. In some embodiments, at least about 50% of the Propionibacterium sample is viable after at least about 60 days of storing. In some embodiments, at least about 60% of the Propionibacterium sample is viable after at least about 60 days of storing. In some embodiments, at least about 70% of the Propionibacterium sample is viable after at least about 60 days of storing. In some embodiments, at least about 80% of the Propionibacterium sample is viable after at least about 60 days of storing. In some embodiments, at least about 90% of the Propionibacterium sample is viable after at least about 60 days of storing. In some embodiments, at least about 95% of the Propionibacterium sample is viable after at least about 60 days of storing. In some embodiments, at least about 50% of the Propionibacterium sample is viable after at least about 90 days of storing. In some embodiments, at least about 60% of the Propionibacterium sample is viable after at least about 90 days of storing. In some embodiments, at least about 70% of the Propionibacterium sample is viable after at least about 90 days of storing. In some embodiments, at least about 80% of the Propionibacterium sample is viable after at least about 90 days of storing. In some embodiments, at least about 90% of the Propionibacterium sample is viable after at least about 90 days of storing. In some embodiments, at least about 95% of the Propionibacterium sample is viable after at least about 90 days of storing. In some embodiments, at least about 50% of the Propionibacterium sample is viable after at least about 120 days of storing. In some embodiments, at least about 60% of the Propionibacterium sample is viable after at least about 120 days of storing. In some embodiments, at least about 70% of the Propionibacterium sample is viable after at least about 120 days of storing. In some embodiments, at least about 80% of the Propionibacterium sample is viable after at least about 120 days of storing. In some embodiments, at least about 90% of the Propionibacterium sample is viable after at least about 120 days of storing. In some embodiments, at least about 95% of the Propionibacterium sample is viable after at least about 120 days of storing. In some embodiments, at least about 50% of the Propionibacterium sample is viable after at least about 180 days of storing. In some embodiments, at least about 60% of the Propionibacterium sample is viable after at least about 180 days of storing. In some embodiments, at least about 70% of the sample is viable after at least about 180 days of storing. In some embodiments, at least about 80% of the Propionibacterium sample is viable after at least about 180 days of storing. In some embodiments, at least about 90% of the Propionibacterium sample is viable after at least about 180 days of storing. In some embodiments, at least about 95% of the Propionibacterium sample is viable after at least about 180 days of storing. In some embodiments, at least about 50% of the Propionibacterium sample is viable after at least about a year of storing. In some embodiments, at least about 60% of the Propionibacterium sample is viable after at least about a year of storing. In some embodiments, at least about 70% of the Propionibacterium sample is viable after at least about a year of storing. In some embodiments, at least about 80% of the Propionibacterium sample is viable after at least about a year of storing. In some embodiments, at least about 90% of the Propionibacterium sample is viable after at least about a year of storing. In some embodiments, at least about 95% of the Propionibacterium sample is viable after at least about a year of storing.

[0271] In some embodiments, compositions disclosed herein have a storage life of at least about thirty days to at least about ninety days. In some embodiments, the compositions disclosed herein have a storage life of at least about 30 days to at least about 120 days. In some embodiments, the compositions disclosed herein have a storage life of at least about 30 days to at least about 180 days. In some embodiments, the compositions disclosed herein have a storage life of at least about thirty days to about ninety days. In some embodiments, the compositions disclosed herein have a storage life of at least about 30 days to about 120 days. In some embodiments, the compositions disclosed herein have a storage life of at least about 30 days to about 180 days. In some embodiments, the compositions disclosed herein have a storage life of at least about thirty days. In some embodiments, the compositions disclosed herein have a storage life of at least about sixty days. In some embodiments, the compositions disclosed herein have a storage life of at least about ninety days. In some embodiments, the compositions disclosed herein have a storage life of at least about 120 days. In some embodiments, the compositions disclosed herein have a storage life of at least about 180 days. In some embodiments, the compositions disclosed herein have a storage life of at least about 240 days. In some embodiments, the compositions disclosed herein have a storage life of at least about one year. In some embodiments, the compositions disclosed herein have a storage life of up to about one year.

[0272] In some embodiments, the compositions disclosed herein are capable of being thawed and subsequently applied to a subject in need thereof. In some embodiments, the compositions disclosed herein are capable of being warmed and subsequently applied to a subject in need thereof. In some embodiments, the compositions disclosed herein are capable of being refrigerated and subsequently applied to a subject in need thereof. In some embodiments, subsequently applied to the subject comprises applying the composition directly to the skin of the subject. In some embodiments, subsequently applied to the subject comprises applying the composition to an application composition before being applied to the skin. The application composition may be selected from a liquid, gel, lotion, emollient, paste, mask, and virtually any solution that can be applied to the skin of a subject. In some embodiments, the application composition is free of any anti-acne agent. In some embodiments, the application composition comprises an anti-acne agent. In some embodiments, the compositions disclosed herein are capable of being applied directly from a frozen stock to skin of a subject without thawing or warming.

TABLE 8
Exemplary Sequences (Additional SEQ IDs provided in sequence listing filed herewith).
Bold characters highlight differences between Type I lipase and Type II lipase.

| SEQ ID | | |
|---|---|---|
| NO. | Description | Sequence |
| 60 | Type I lipase | gtagatacagatacatctgaggagatccatgaagaaaaactggttactcacaaccctccttgccaca |
| | | atgatgatcgccatgggcacgacgaccaccgccttcgccagcccgcctaccgacatcactcccgaa |
| | | catccaggcggggttaccgcgcctcacagccccgacggaatcccctcgaatattgaggggccaagt |
| | | atgcccagctggacctctgcaatcaggttcgcaatgaagaaccccggcacgaaagtcccgggcacc |
| | | aacgacttcacctgcaaaccgaggaaaggcacccatcccgtcgtgctcatcccgggcacatccgag |
| | | gacgccttcatcacgtggtcgtactacggtccccgccaggattctgcgcctacacgttcaactacaac |
| | | ccggaaacacatccgcttgtggaagccgctgagaccagcggcaacatctactccacggcagctttc |
| | | atggcccacttcgttgacagagtgctcaaggcaaccggtgctcagaaggtcaacctcgtcggccatt |
| | | ctcagggcggcggccccctgccgcgcgcgtacatcaaatattacggggcgccaagaaagtcctcat |
| | | ctcgtcggtttggttccttccaacaggggaacacgcatgctcggcctggagaagttcctcaatgccag |
| | | cggaaacccgctcagcactatcttcaatgctgcagcacagtttcgaaagctggaatccctgccccaac |
| | | agttgcaagactccacatttctcagggaactcaacgcggatggaatgaccgtccccggcatcacata |
| | | caccgtcatcgccacccagttcgacaaccgagtatttccgtggactaataccttcatcaatgagcccg |
| | | gggtcaagaacatcgtcatccaagacgtctgtcccttggaccacagcgcccacacggatatccctag |
| | | gacccgatgacccttcagattgtcatcaacgccttggaccccgagcgggccgccccggtcacctgc |
| | | accattcgcccattcaggcccagttag |
| 61 | Type II lipase | gcagatgcatctgagaagatccatgaagaaaaactggttactcacaaccctccttgccacaatgatga |
| | | tcgccatgggcacgacgaccaccgccttcgccagcccgcctaccgacatcactcccgaacatccag |
| | | gcggggttacccgcctcacagccccgacggaatcccctcgaatattgaggggccaagtatgcccag |
| | | ctggacctctgcaatcaggttcgcaatgaagaaccccggcacgaaagtcccgggcaccaacgactt |
| | | cacctgcaaaccgaggaaaggcacccatcccgtcgtgctcatcccgggcacatccgaggacgcctt |
| | | catcacgtggtcgtactacggtccccgccaggattctgcgcctacacgttcaactacaacccggaaa |
| | | cacatccgcttgtggaagccgctgagaccagcggcaacatctactccacggcagattcatggccca |
| | | cttcgttgacagagtgctcaaggcaaccggtgctcagaaggtcaacctcgtcggccattctcagggc |
| | | ggcggccccctgccgcgcgcgtacatcaaatattacggggcgccaagaaagtcctcatctcgtcgg |
| | | tttggttccttccaacaggggaacacgcatgctcggcctggagaagttcctcaatgccagcggaaac |
| | | ccgctcagcactatcttcaatgctgcagcacagtttcgaaagctggaatccctgccccaacagttgca |
| | | agactccacatttctcagggaactcaacgcggatggaatgaccgtccccggcatcacatacaccgtc |
| | | atcgccacccagttcgacaaccgagtatttccgtggactaataccttcatcaatgagcccggggtcaa |
| | | gaacatcgtcatccaagacgtctgtcccttggaccacagcgcccacacggatatccctaggacccga |
| | | tgacccttcagattgtcatcaacgccttggaccccgagcgggccgccccggtcacctgcaccattcg |
| | | cccattcaggcccagttag |

[0273] The disclosure is further understood through review of the numbered embodiments recited herein. Various embodiments contemplated herein may include, but need not be limited to, one or more of the following, and combinations thereof:

[0274] 1. A pharmaceutical probiotic composition comprising: (a) a therapeutically effective amount of a health-associated Propionibacterium acnes microbe, wherein the health-associated Propionibacterium acnes microbe has been engineered or selected to comprise at least one gene encoding at least one of a deoxyribose operon repressor and a type II lipase, and less than about 10% pIMPLE plasmid; and (b) a pharmaceutically acceptable excipient or biological stabilizer. 2. The pharmaceutical probiotic composition of embodiment 1, wherein the health-associated Propionibacterium acnes microbe has been engineered or selected to comprise a deoxyribose operon repressor and a type II lipase. 3. The pharmaceutical probiotic composition of embodiment 1 or 2, wherein a Cas 5 protein is absent from the health-associated Propionibacterium acnes microbe. 4. The pharmaceutical probiotic composition of any one of embodiments 1-3, wherein the health-associated Propionibacterium acnes microbe comprises an RT1 or RT2 ribotype. 5. The pharmaceutical probiotic composition of any one of embodiments 1-4, wherein the health-associated Propionibacterium acnes microbe does not comprise an RT6 ribotype. 6. The pharmaceutical probiotic composition of any one of embodiments 1-5, wherein the health-associated Propionibacterium acnes microbe comprises less than about 1% pIMPLE plasmid. 7. The pharmaceutical probiotic composition of any one of embodiments 1-6, wherein the health-associated Propionibacterium acnes microbe comprises less than about 0.3% pIMPLE plasmid. 8. The pharmaceutical probiotic composition of any one of embodiments 1-7, wherein the health-associated Propionibacterium acnes microbe comprises a mixture of two or more different ribotypes of Propionibacterium acnes. 9. The pharmaceutical probiotic composition of any one of embodiments 1-8, wherein the pharmaceutically acceptable excipient or biological stabilizer increases the viability of the health-associated Propionibacterium acnes microbe at a temperature from about −10° C. to about 30° C. 10. The pharmaceutical probiotic composition of any one of embodiments 1-9, comprising at least one of an HP3A11 strain of P. acnes, an HP3B4 strain of P. acnes, an HP4G1 strain of P. acnes, or an HP5G4 strain of P. acnes. 11. The pharmaceutical probiotic composition of any one of embodiments 1-10, comprising at least one additional strain of bacteria comprising Propionibacterium avidum, Propionibacterium acnes sub sp. defendens, or Propionibacterium granulosum. 12. The pharmaceutical probiotic composition of any one of embodiments 1-11, wherein the health-associated Propionibacterium acnes microbe expresses an ATP binding cassette transporter. 13. The pharmaceutical probiotic composition of any one of embodiments 1-12, wherein the health-associated Propionibacterium acnes microbe does not express a DNA binding response regulator or a phosphoglycerate kinase. 14. A method of treating a skin disorder or condition comprising applying a therapeutically effective amount of a pharmaceutical probiotic composition comprising: (a) therapeutically effective amount of a health-associated Propionibacterium acnes microbe, wherein the health-associated Propionibacterium acnes microbe has been engineered or selected to comprise at least one gene encoding at least one of a deoxyribose operon repressor and a type II lipase, and less than about 10% pIMPLE plasmid; and (b) a pharmaceutically acceptable excipient or biological stabilizer. 15. The method of embodiment 14, wherein the skin disorder or condition comprises acne, eczema, seborrheic dermatitis, psoriasis, or rosacea. 16. The method of embodiment 14 or 15, wherein the health-associated Propionibacterium acnes microbe has been engineered or selected to at least one gene encoding the deoxyribose operon repressor and the type II lipase. 17. The method of any one of embodiments 14-16, wherein a CRISPR locus or portion thereof is absent from the health-associated Propionibacterium acnes microbe. 18. The method of any one of embodiments 14-17, wherein the health-associated Propionibacterium acnes microbe comprises an RT1 or RT2 ribotype. 19. The method of any one of embodiments 14-18, wherein the health-associated Propionibacterium acnes microbe does not comprise an RT6 ribotype. 20. The method of any one of embodiments 14-19, wherein the health-associated Propionibacterium acnes microbe comprises less than about 1% pIMPLE plasmid. 21. The method of any one of embodiments 14-20, wherein the health-associated Propionibacterium acnes microbe comprises less than about 0.3% pIMPLE plasmid. 22. The method of any one of embodiments 14-21, wherein the health-associated Propionibacterium acnes microbe comprises a mixture of two or more different ribotypes. 23. The method of any one of embodiments 14-22, wherein the pharmaceutically acceptable excipient or biological stabilizer increases the viability of the health-associated Propionibacterium acnes microbe at a temperature from about −10° C. to about 30° C. 25. 24. The method of any one of embodiments 14-23, wherein the health-associated Propionibacterium acnes microbe comprises at least one of an HP3A11 strain, an HP3B4 strain, an HP4G1, or an HP5G4 strain. 25. The method of any one of embodiments 14-24, wherein the pharmaceutical probiotic composition comprises an additional strain of bacteria comprising Propionibacterium avidum, Propionibacterium acnes subsp. defendens or Propionibacterium granulosum. 26. A pharmaceutical probiotic composition comprising: (a) a first therapeutically effective amount of a first health-associated Propionibacterium acnes microbe, wherein the first health-associated Propionibacterium acnes microbe has been engineered or selected to at least one gene encoding at least one of a deoxyribose operon repressor and a type II lipase, and less than about 10% pIMPLE plasmid; (b) a second therapeutically effective amount of a second health-associated Propionibacterium acnes microbe, wherein the second health-associated Propionibacterium acnes microbe has been engineered or selected to comprise at least one gene encoding at least one of a deoxyribose operon repressor and a type II lipase, and less than about 10% pIMPLE plasmid; and (c) a pharmaceutically acceptable excipient or biological stabilizer. 27. The pharmaceutical probiotic composition of embodiment 26, wherein the first or the second health-associated Propionibacterium acnes microbe has been engineered or selected to comprise: (i) at least one gene encoding the deoxyribose operon repressor and the type II lipase, (ii) at least one gene encoding the deoxyribose operon repressor and less than about 10% pIMPLE plasmid, or (iii) at least one gene encoding the type II lipase and less than about 10% pIMPLE plasmid. 28. The pharmaceutical probiotic composition of embodiment 26 or 27, wherein the first and the second health-associated Propionibacterium acnes microbe has been engineered or selected to comprise: (i) at least one gene encoding the deoxyribose operon repressor and the type II lipase, (ii) at least one gene encoding the deoxyribose operon repressor and less than about 10% pIMPLE plasmid, or (iii) at least one gene encoding the type II lipase and less than about 10% pIMPLE plasmid. 29. The pharmaceutical probiotic composition of any one of embodiments 26-28, wherein the first or the second health-associated Propionibacterium acnes microbe has been engineered or selected to comprise at least one gene encoding the deoxyribose operon repressor, the type II lipase, and less than about 10% pIMPLE plasmid. 30. The pharmaceutical probiotic composition of any one of embodiments 26-29, wherein the first and the second health-associated Propionibacterium acnes microbe has been engineered or selected to comprise at least one gene encoding the deoxyribose operon repressor, the type II lipase, and less than about 10% pIMPLE plasmid. 31. The pharmaceutical probiotic composition of any one of embodiments 26-30, wherein the first and the second health-associated Propionibacterium acnes microbes are different strains. 32. The pharmaceutical probiotic composition of any one of embodiments 26-31, wherein the first or the second health-associated Propionibacterium acnes microbe comprises an RT1 or RT2 ribotype. 33. The pharmaceutical probiotic composition of any one of embodiments 26-32, wherein the first health-associated Propionibacterium acnes microbe comprises an RT1 ribotype and the second health-associated Propionibacterium acnes microbe comprises an RT2 ribotype. 34. The pharmaceutical probiotic composition of any one of embodiments 26-33, wherein neither the first nor the second health-associated Propionibacterium acnes microbe comprises an RT6 ribotype. 35. The pharmaceutical probiotic composition of any one of embodiments 26-34, wherein the pharmaceutically acceptable excipient or biological stabilizer increases the viability of the health-associated. Propionibacterium acnes microbe at a temperature from about −10° C. to about −30° C. 36. The pharmaceutical probiotic composition of any one of embodiments 26-35, for use in the treatment of a skin disorder or condition. 37. The pharmaceutical probiotic composition of any one of embodiments 26-36, wherein the health-associated Propionibacterium acnes microbe comprise an HP3A11 strain, an HP3B4 strain, an HP4G1 strain, or an HP5G4 strain. 38. The pharmaceutical probiotic composition of any one of embodiments 26-37, wherein the first or second health-associated Propionibacterium acnes microbe expresses an ATP binding cassette transporter. 39. The pharmaceutical probiotic composition of any one of embodiments 26-38, wherein the first or second health-associated Propionibacterium acnes microbe does not express a DNA binding response regulator or a phosphoglycerate kinase. 40. A method of producing a desired preparation of a Propionibacterium acnes bacteria, said method comprising: (a) adding a sample of the Propionibacterium acnes bacteria to a glycerol solution to produce a Propionibacterium acnes glycerol stock, and (b) storing the Propionibacterium acnes glycerol stock at a temperature of about 4° C. or less, wherein more than about 50% of the P. acnes bacteria is viable when the Propionibacterium acnes bacteria in the glycerol solution is brought to ambient temperature. 41. The method of embodiment 40, wherein the glycerol solution is between about 25% and about 75% glycerol. 42. The method of embodiment 40 or 41, wherein the glycerol solution is about 50% glycerol. 43. The method of any one of embodiments 40-42, wherein the temperature is between about 4° C. and about −80° C. 44. The method of any one of embodiments 40-43, wherein the temperature is about −20° C. 45. The method of any one of embodiments 40-44, wherein at least about 70% to at least about 90% of the sample is viable after the Propionibacterium acnes glycerol stock is brought to ambient temperature. 46. The method of any one of embodiments 40-45, wherein at least about 90% of the sample is viable after the Propionibacterium acnes glycerol stock is brought to ambient temperature. 47. The method of embodiment 45 or 46, wherein the ambient temperature is between about 20° C. and about 30° C. 48. The method of embodiment 45 or 46, wherein the ambient temperature is about 25° C. 49. The method of any one of embodiments 45-48, wherein the Propionibacterium acnes glycerol stock is brought to ambient temperature before about 90 days of storing. 50. The method of any one of embodiments 40-49, wherein more than 50% of the sample is viable after about 20 days of storing. 51. The method of any one of embodiments 40-49, wherein more than about 50% of the sample is viable after about 90 days of storing. 52. The method of any one of embodiments 40-49, wherein more than about 50% of the sample is viable at least up to about 90 days of storing. 53. The method of any one of embodiments 40-52, wherein Propionibacterium acnes bacteria comprises at least one of an HP3A11 strain, an HP3B4 strain, an HP4G1 strain, or an HP5G4 strain. 54. A method of producing a desired preparation of a preserved Propionibacterium acnes sample, wherein up to about 90% of said preserved Propionibacterium acnes sample is viable after sixty days of storage, said method comprising: (a) adding a sample of Propionibacterium acnes bacteria to a solution of between about 1% and about 50% glycerol in phosphate buffered saline solution to produce a Propionibacterium acnes glycerol stock; and (b) storing the Propionibacterium acnes glycerol stock at a temperature, wherein the temperature is between about −20° C. and about 30° C., thereby forming said desired preparation wherein up to about 90% of said sample of Propionibacterium acnes bacteria is viable after sixty days of storage. 55. A method of producing a desired preparation of a preserved Propionibacterium acnes sample, wherein up to about 90% of said preserved Propionibacterium acnes sample is viable after ninety days of storage, said method comprising: (a) adding a sample of Propionibacterium acnes bacteria to a solution of about 50% glycerol to produce a Propionibacterium acnes glycerol stock; and (b) freezing the Propionibacterium acnes glycerol stock at −20° C., thereby forming said desired preparation wherein up to about 90% of said sample of Propionibacterium acnes bacteria is viable after a thawing of the Propionibacterium acnes glycerol stock. 56. The method of embodiment 55, comprising thawing the Propionibacterium acnes glycerol stock at room temperature. 57. The method of embodiment 55 or 56, wherein the solution is about 1-50% glycerol v/v. 58. The method of any one of embodiments 55-57, wherein the solution is about 5-25% glycerol v/v. 59. The method of any one of embodiments 55-58, wherein the solution is a buffered solution. 60. The method of embodiment 59, wherein the buffered solution is selected from a phosphate buffered saline solution and an acetate buffered solution. 61. The method of any one of embodiments 55-60, wherein the solution comprises potassium. 62. The method of embodiment 61, wherein the solution comprises potassium at a concentration of about 150 mM to about 200 mM. 63. The method of any one of embodiments 55-62, wherein the solution comprises calcium. 64. The method of embodiment 63, wherein the solution comprises calcium at a concentration of about 0.05 mM to about 0.1 mM. 65. The method of any one of embodiments 55-64, wherein the solution comprises a prebiotic stabilizing agent. 66. The method of embodiment 65, wherein the prebiotic stabilizing agent is inulin. 67. The method of embodiment 66, wherein inulin is present in the solution at a concentration of about 0.05% v/v to about 0.2% v/v. 68. The method of any one of embodiments 55-67, wherein the solution comprises an anti-acne agent. 69. The method of embodiment 68, wherein the anti-acne agent comprises a retinoid, a vitamin, an antioxidant, a peroxide, an acid, an oil, an alcohol, an extract, an analog thereof, or a combination thereof. 70. The method of embodiment 69, wherein the retinoid comprises tretinoin, tazarotene, adapalene, retinol, or a combination thereof. 71. The method of embodiment 69, wherein the vitamin or analog thereof comprises Vitamin D, Vitamin C, Vitamin E, or calciptotriene. 72. The method of embodiment 69, wherein the antioxidant comprises Vitamin C or Vitamin E. 73. The method of embodiment 69, wherein the peroxide is benzoyl peroxide. 74. The method of embodiment 69, wherein the acid comprises salicylic acid, azaelic acid, trichloracetic acid, or glycolic acid. 75. The method of embodiment 69, wherein the alcohol comprises retinol or resveratrol. 76. The method of embodiment 69, wherein the oil is tea tree oil. 77. The method of embodiment 69, wherein the extract is a green tea extract. 78. The method of any one of embodiments 54-77, wherein the solution is incorporated in a biologic stability platform to eliminate cold chain storage. 79. The method of embodiment 78, wherein the biologic storage platform comprises foam drying or foam formation of the solution or glycerol stock solution. 80. The method of embodiment 78, wherein the solution comprises at least one of a glyconanoparticle, a liposome, a nanoparticle, trehalose, sucrose, stachyose, hydroxyethyl starch, or a combination of glycine and mannitol. 81. The method of any one of embodiment s 54-80, wherein the sample of Propionibacterium acnes bacteria comprises Propionibacterium acnes bacteria of ribotype RT1. 82. The method of any one of embodiment s 54-80, wherein the sample of Propionibacterium acnes bacteria comprises Propionibacterium acnes bacteria of ribotype RT2. 83. The method of any one of embodiment s 54-80, wherein the sample of Propionibacterium acnes bacteria comprises Propionibacterium acnes bacteria of ribotype RT1 and RT2. 84. The method of any one of embodiment s 54-83, wherein the Propionibacterium acnes bacteria is characterized by at least one of the following: comprises a deoR protein; comprises a type II lipase; comprises less than 10% pIMPLE plasmid; does not comprise a Cas5 protein; comprises an ATP binding cassette transporter protein; does not comprise a DNA binding response regulator; and does not comprise a phosphoglycerate kinase. 85. The method of any one of embodiment s 54-83, wherein the sample of Propionibacterium acnes bacteria comprises Propionibacterium acnes bacteria comprises an HP3A11 strain, an HP3B4 strain, an HP4G1 strain, an HP5G4 strain. 86. A pharmaceutical composition comprising: (a) a therapeutically effective amount of a health-associated Propionibacterium acnes microbe, wherein the health-associated Propionibacterium acnes microbe is characterized by at least one of the following: comprises at least one gene encoding at least one of a deoxyribose operon repressor and a type II lipase, and less than about 10% pIMPLE plasmid; comprises at least one gene encoding an ATP binding cassette transporter; or lacks at least one gene encoding a DNA binding response regulator or a phosphoglycerate kinase, and (b) a pharmaceutically acceptable excipient or biological stabilizer. 87. The pharmaceutical probiotic composition of embodiment 86, wherein the health-associated Propionibacterium acnes microbe has been engineered or selected to comprise a deoxyribose operon repressor and a type II lipase. 88. The pharmaceutical probiotic composition of embodiment 86 or 87, wherein a Cas5 protein is absent from the health-associated Propionibacterium acnes microbe. 89. The pharmaceutical probiotic composition of any one of embodiments 86-88, wherein the health-associated Propionibacterium acnes microbe expresses an ATP binding cassette transporter. 90. The pharmaceutical probiotic composition of any one of embodiments 86-89, wherein the health-associated Propionibacterium acnes microbe does not express a DNA binding response regulator or a phosphoglycerate kinase. 91. The pharmaceutical probiotic composition of any one of embodiments 86-90, wherein the health-associated Propionibacterium acnes microbe comprises an RT1 or RT2 ribotype. 92. The pharmaceutical probiotic composition of any one of embodiments 86-91, wherein the health-associated Propionibacterium acnes microbe does not comprise an RT6 ribotype. 93. The pharmaceutical probiotic composition of any one of embodiments 86-92, wherein the health-associated Propionibacterium acnes microbe comprises less than about 1% pIMPLE plasmid. 94. The pharmaceutical probiotic composition of any one of embodiments 86-93, wherein the health-associated Propionibacterium acnes microbe comprises less than about 0.3% pIMPLE plasmid. 95. The pharmaceutical probiotic composition of any one of embodiments 86-94, wherein the pharmaceutically acceptable excipient or biological stabilizer increases the viability of the health-associated Propionibacterium acnes microbe at a temperature from about −20° C. to about 30° C. 96. The pharmaceutical composition of any one of embodiments 86-95, wherein the health-associated Propionibacterium acnes microbe comprises a mixture of two or more different ribotypes of Propionibacterium acnes. 97. The pharmaceutical probiotic composition of any one of embodiments 86-96, wherein the health-associated Propionibacterium acnes microbe comprises an HP3A11 strain, an HP3B4 strain, an HP4G1 strain, or an HP5G4 strain. 98. The pharmaceutical probiotic composition of any one of embodiments 86-97, comprising an additional strain of bacteria, wherein the additional strain comprises Propionibacterium avidum, Propionibacterium acnes subsp. defendens, or Propionibacterium granulosum. 99. A method of treating a skin disorder or condition comprising applying a therapeutically effective amount of a pharmaceutical probiotic composition comprising: (a) a therapeutically effective amount of a health-associated Propionibacterium acnes microbe, wherein the health-associated Propionibacterium acnes microbe is characterized by at least one of the following: comprises at least one gene encoding at least one of a deoxyribose operon repressor and a type II lipase, and less than about 10% pIMPLE plasmid; comprises at least one gene encoding an ATP binding cassette transporter; or lacks at least one gene encoding a DNA binding response regulator or a phosphoglycerate kinase, and (b) a pharmaceutically acceptable excipient or biological stabilizer. 100. The method of embodiment 99, wherein the skin disorder or condition comprises acne, eczema, seborrheic dermatitis, psoriasis, or rosacea, or a combination thereof 101. The method of embodiment 99 or 100, wherein the health-associated Propionibacterium acnes microbe has been engineered or selected to at least one gene encoding the deoxyribose operon repressor and the type II lipase. 102. The method of any one of embodiments 99 to 101, wherein a Cas5 protein is absent from the health-associated Propionibacterium acnes microbe. 103. The method of any one of embodiments 99 to 102, wherein the health-associated Propionibacterium acnes microbe comprises an RT1 or RT2 ribotype. 104. The method of any one of embodiments 99 to 103, wherein the health-associated Propionibacterium acnes microbe does not comprise an RT6 ribotype. 105. The method of any one of embodiments 99 to 104, wherein the health-associated Propionibacterium acnes microbe comprises less than about 1% pIMPLE plasmid. 106. The method of any one of embodiments 99 to 105, wherein the health-associated Propionibacterium acnes microbe comprises less than about 0.3% pIMPLE plasmid. 107. The method of any one of embodiments 99 to 106, wherein the pharmaceutically acceptable excipient or biological stabilizer increases the viability of the health-associated Propionibacterium acnes microbe at a temperature from about −20° C. to about 30° C. 108. The method of any one of embodiments 99 to 107, wherein the health-associated Propionibacterium acnes microbe comprises a mixture of two or more different ribotypes. 109. The method of any one of embodiments 99 to 108, wherein the health-associated Propionibacterium acnes microbe comprises an HP3A11 strain, an HP3B4 strain, an HP4G1 strain, or an HP5G4 strain. 110. The method of any one of embodiments 99 to 109, wherein the pharmaceutical probiotic composition comprises an additional strain of bacteria, wherein the additional strain comprises Propionibacterium avidum, Propionibacterium acnes subsp. defendens, or Propionibacterium granulosum. 111. A pharmaceutical probiotic composition comprising: (a) a first therapeutically effective amount of a first health-associated Propionibacterium acnes microbe, wherein the first health-associated Propionibacterium acnes microbe is characterized by at least one of the following: comprises at least one gene encoding at least one of a deoxyribose operon repressor and a type II lipase, and less than about 10% pIMPLE plasmid; comprises at least one gene encoding an ATP binding cassette transporter; or lacks at least one gene encoding a DNA binding response regulator or a phosphoglycerate kinase; (b) a second therapeutically effective amount of a second health-associated microbe; and (c) a pharmaceutically acceptable excipient or biological stabilizer. 112. The pharmaceutical probiotic composition of embodiment 111, wherein the second health-associated microbe is a strain of bacteria comprising P. acnes, P. granulosum, P. acnes subsp. defendens or P. avidum. 113. The pharmaceutical probiotic composition of embodiment 111 or 112, wherein the second health-associated microbe is characterized by at least one of the following: comprises at least one gene encoding at least one of a deoxyribose operon repressor and a type II lipase, and less than about 10% pIMPLE plasmid; comprises at least one gene encoding an ATP binding cassette transporter; or lacks at least one gene encoding a DNA binding response regulator or a phosphoglycerate kinase. 114. The pharmaceutical probiotic composition of any one of embodiments 111-113, wherein the second health-associated microbe is a strain of P. acnes bacteria of ribotype RT1 or RT2. 115. The pharmaceutical probiotic composition of any one of embodiments 111-114, wherein the first health-associated Propionibacterium acnes microbe or the second health-associated microbe comprises an isolated or purified strain of bacteria. 116. A pharmaceutical composition comprising: (a) a pharmaceutically acceptable excipient or biological stabilizer; and (b) a therapeutically effective amount of a health-associated Propionibacterium acnes microbe, wherein the health-associated Propionibacterium acnes microbe does not express a DNA binding response regulator, a phosphoglycerate kinase, or a combination thereof. 117. A pharmaceutical composition comprising: (a) a pharmaceutically acceptable excipient or biological stabilizer; and (b) a therapeutically effective amount of a health-associated Propionibacterium acnes microbe, wherein the health-associated Propionibacterium acnes microbe expresses an ATP-binding cassette transporter. 118. A pharmaceutical composition comprising: (a) a pharmaceutically acceptable excipient or biological stabilizer; and (b) a therapeutically effective amount of a health-associated Propionibacterium acnes microbe, wherein the health-associated Propionibacterium acnes microbe: does not express a DNA binding response regulator, a phosphoglycerate kinase, or a combination thereof; and expresses an ATP-binding cassette transporter. 119. The pharmaceutical of any one of embodiments 86, 116, and 118, wherein the DNA binding response regulator is encoded by a sequence of SEQ ID NO: 7. 120. The pharmaceutical of any one of embodiments 86, 116, and 118, wherein the DNA binding response regulator is encoded by a sequence that is at least 50% homologous to a sequence of SEQ ID NO: 7. 121. The pharmaceutical of any one of embodiments 86, 116, and 118, wherein the phosphoglycerate kinase is encoded by a sequence of SEQ ID NO: 9. 122. The pharmaceutical of any one of embodiments 86, 116, and 118, wherein the phosphoglycerate kinase is encoded by a sequence that is at least 50% homologous to a sequence of SEQ ID NO: 9. 123. The pharmaceutical of embodiment 116 or 117, wherein the ATP-binding cassette transporter is encoded by a sequence of SEQ ID NO: 6. 124. The pharmaceutical of any one of embodiments 86, 117, and 118, wherein the ATP-binding cassette transporter is encoded by a sequence that is at least 50% homologous to a sequence of SEQ ID NO: 6. 125. The pharmaceutical composition of any one of embodiments 86 and 116-124, comprising at least two strains of bacteria. 126. The pharmaceutical composition of any one of embodiments 86 and 116-125, comprising a strain of Propionibacterium acnes having a ribotype of RT1, RT2, RT3, RT4 or RT5. 127. The pharmaceutical composition of any one of embodiments 86 and 116-126, comprising a strain of Propionibacterium acnes having a ribotype of RT1 or RT2. 128. The pharmaceutical probiotic composition of any one of embodiments 86 and 116-127, wherein the health-associated Propionibacterium acnes microbe does not comprise an RT6 ribotype. 129. The pharmaceutical composition of any one of embodiments 86 and 116-128, wherein the pharmaceutical composition is formulated for topical administration. 130. The pharmaceutical composition of any one of embodiments 86 and 116-129, wherein the pharmaceutical composition is in the form of a gel, ointment, lotion, emulsion, paste, cream, foam, mousse, liquid, spray, suspension, dispersion and aerosol. 131. The pharmaceutical composition of any one of embodiments 86 and 116-130, comprising a liposome or nanoparticle. 132. The pharmaceutical probiotic composition of any one of embodiments 86 and 116-131, wherein the health-associated Propionibacterium acnes microbe comprises a deoxyribose operon repressor and a type II lipase. 133. The pharmaceutical probiotic composition of any one of embodiments 86 and 116-132, wherein a Cas5 protein is absent from the health-associated Propionibacterium acnes microbe. 134. The pharmaceutical probiotic composition of any one of embodiments 86 and 116-133, wherein the health-associated Propionibacterium acnes microbe comprises less than about 1% pIMPLE plasmid. 135. The pharmaceutical probiotic composition of any one of embodiments 86 and 116-133, wherein the health-associated Propionibacterium acnes microbe comprises less than about 0.3% pIMPLE plasmid. 136. The pharmaceutical composition of any one of embodiments 86 and 116-135, wherein the health-associated Propionibacterium acnes microbe comprises a mixture of two or more different ribotypes of Propionibacterium acnes. 137. The pharmaceutical probiotic composition of any one of embodiments 86 and 116-136, wherein the pharmaceutically acceptable excipient or biological stabilizer increases the viability of the health-associated Propionibacterium acnes microbe at a temperature from about −10° C. to about 30° C. 138. The pharmaceutical probiotic composition of any one of embodiments 86 and 116-137, comprising an additional strain of bacteria. 139. The pharmaceutical probiotic composition of any one of embodiments 86 and 116-137, comprising an additional strain of bacteria, wherein the additional strain comprises Propionibacterium avidum, Propionibacterium acnes sub sp. defendens or Propionibacterium granulosum. 140. The pharmaceutical probiotic composition of any one of embodiments 86 and 116-137, wherein the health-associated Propionibacterium acnes microbe is selected, transformed or engineered to: comprise at least one gene encoding at least one of a deoxyribose operon repressor and a type II lipase, and less than about 10% pIMPLE plasmid; comprise at least one gene encoding an ATP binding cassette transporter; or lack at least one gene encoding a DNA binding response regulator or a phosphoglycerate kinase. 141. A method of treating a skin disorder or condition comprising applying a therapeutically effective amount of a pharmaceutical composition of any one of embodiments 86 and 116-140. 142. The method of embodiment 141, wherein the skin disorder or condition comprises acne, eczema, seborrheic dermatitis, psoriasis, or rosacea, or a combination thereof. 143. A pharmaceutical composition comprising: (a) a first therapeutically effective amount of a first health-associated Propionibacterium microbe, wherein the first health-associated Propionibacterium microbe produces less than about one micromolar porphyrin; (b) a second therapeutically effective amount of a second health-associated microbe; and (c) a pharmaceutically acceptable excipient or biological stabilizer. 144. The pharmaceutical composition of embodiment 143, wherein the second health-associated microbe comprises a strain of Propionibacterium. 145. The pharmaceutical composition of embodiment 143 or 144, wherein, wherein the second health-associated microbe produces less than about one micromolar porphyrin. 146. The pharmaceutical composition of any one of embodiments 143-145, wherein the first health-associated Propionibacterium microbe and the second health-associated Propionibacterium microbe collectively produce less than about one micromolar porphyrin. 147. The pharmaceutical composition of any one of embodiments 143-146, wherein at least one of the first health-associated Propionibacterium microbe and the second health-associated Propionibacterium microbe produce less than about 200 nM porphyrin. 148. The pharmaceutical composition of any one of embodiments 143-146, wherein at least one of the first health-associated Propionibacterium microbe and the second health-associated Propionibacterium microbe produce less than about 100 nM porphyrin. 149. The pharmaceutical composition of any one of embodiments 143-148, wherein the first health-associated Propionibacterium microbe and the second health-associated Propionibacterium microbe collectively produce less than about 100 nM porphyrin. 150. The pharmaceutical composition of any one of embodiments 143-149, wherein at least one of the first health-associated Propionibacterium microbe and the second health-associated Propionibacterium microbe produce less than about one micromolar porphyrin in situ. 151. The pharmaceutical composition of any one of embodiments 143-150, wherein at least one of the first health-associated Propionibacterium microbe and the second health-associated Propionibacterium microbe produce less than about one micromolar porphyrin in vitro. 152. The pharmaceutical composition of any one of embodiments 143-151, wherein at least the first health-associated Propionibacterium microbe comprises a strain of Propionibacterium acnes, Propionibacterium granulosum, Propionibacterium avidum, or Propionibacterium acnes subsp. defendens. 153. The pharmaceutical composition of any one of embodiments 143-152, wherein at least the first health-associated Propionibacterium microbe comprises a strain of Propionibacterium acnes. 154. The pharmaceutical composition of any one of embodiments 143-153, wherein at least the first health-associated Propionibacterium microbe comprises a Propionibacterium acnes of a ribotype RT1 or RT2. 155. The pharmaceutical composition of any one of embodiments 143-154, wherein at least the first health-associated Propionibacterium microbe: (a) comprises at least one gene encoding an ATP binding cassette transporter; (b) comprises at least one gene encoding at least one of a deoxyribose operon repressor and a type II lipase, and less than about 10% pIMPLE plasmid; or (c) lacks at least one gene encoding a DNA binding response regulator or a phosphoglycerate kinase.

### EXAMPLES

[0275] The following examples are given for the purpose of illustrating various embodiments of the disclosure and are not meant to limit the present disclosure in any fashion. The present examples, along with the methods described herein are presently representative of preferred embodiments, are exemplary, and are not intended as limitations on the scope of the disclosure. Changes therein and other uses which are encompassed within the spirit of the disclosure as defined by the scope of the claims will occur to those skilled in the art.

### Example 1: Identification of Health-Associated Strains

[0276] Characteristics that may predispose a particular microbe to be a health-associated microbe can be determined using samples from healthy and disease afflicted individuals, culturing the microbes from each, and performing a comparative genomic analysis. In the present example, samples were collected from individuals afflicted with acne vulgaris in order to determine health-associated P. acnes strains.

[0277] Microcomedone or swab samples were collected from consented adult subjects. Clonal samples were isolated by limiting dilution on plates, and then grown in 200 μL of liquid culture. Microbial DNA was isolated from 96 individual cultures. DNA was isolated using QIAgen's DNeasy Blood & Tissue kit, following the manufacturer's instructions. QIAgen's DNeasy Blood & Tissue kit, following the manufacturer's instructions. Paired-end DNA sequencing (2×300 bp) was done on an Illumina MiSeq using reagent kit v3, following the manufacturer's instructions, yielding 200,000 to 600,000 reads for each of the 96 samples. Initial analysis was performed in Illumina's Basespace Sequence Hub, all reads from each sample are aligned with a BWA Aligner to:
[0278] a. deoR;
[0279] b. Propionibacterium acnes ATCC 11828 (accession CP003084); or
[0280] c. pIMPLE and other reference genomes.
   Alignments were interrogated with the Broad Institute's Integrative Genomics Viewer and confirmed using Biomatter's Geneious version 9.1. All 96 clones were analyzed for the presence or absence of the deoR sequence, type I lipase or type II lipase sequence, and presence or absence of pIMPLE plasmid. Sequence alignments were performed between sequences of P. acnes from healthy volunteers and the deoR gene. Analysis revealed that approximately half of all healthy clones were positive for deoR (greater than 0.40 of reads mapping to deoR locus). Sequence alignments were also performed between P. acnes of healthy volunteers and the lipase gene locus P. acnes were positive for type I Lipase and for type II Lipase. With regard to the pIMPLE plasmid sequence alignments of reads from healthy volunteers performed against p4PLE-HL96PA1 (Genflank: CP003294.1), revealed P. acnes from healthy volunteers are free of pIN/PLE plasmid. Reads from healthy volunteers map P. acnes to ribotype RT1. FIG. 2 corroborates this by showing that more RT1 strains are deoR positive and type II lipase positive when compare to RT2. Some results are summarized in Table 2.

TABLE 2
summary of sequencing data for the P. acnes
isolated from healthy volunteers

| | | RT1; | RT1; | | | | |
|---|---|---|---|---|---|---|---|
| | RT1; | deoR+; | deoR+; | | | | |
| | deoR− | LP1 | LP2 | RT2 | Staph. | Other | sum |
| reads | 112 | 160 | 42 | 1 | 7 | 48 | 370 |
| % of total | 30.3% | 43.2% | 11.4% | 0.3% | 1.9% | 13.0% | |

RT1 = ribotype 1;
RT2 = ribotype 2;
deoR− = no deoR;
deoR+ = deoR;
LP1 = type I; Lipase;
PL2 = type II lipase;
Staph = Staphylococcus;
other P. avidum, P. acidipropionici, or Staphylococcus

### Example 2: Identification of Health-Associated Strains with Hyaluronidase Genes

[0281] Health-associated P. acnes clones that were RT1 or RT2 positive were further examined for presence of a gene encoding hyaluronidase. Unexpectedly most health-associated strains that were positive for Type II lipase also possessed a hyaluronidase gene. See Table 3.

TABLE 3
Hyaluronidase presence in health-associated P. acnes
strains also positive for type II lipase

| Clone | Ribotype | Hyaluronidase |
|---|---|---|
| 1 | RT1; deoR+; L2 | Yes |
| 2 | RT1; deoR+; L2 | Yes |
| 3 | RT1; deoR+; L2 | Yes |
| 4 | RT1; deoR+; L2 | Yes |
| 5 | RT1; deoR+; L2 | Yes |
| 6 | RT1; deoR+; L1 | No |
| 7 | RT1; deoR+; L2 | Yes |
| 8 | RT1; deoR+; L2 | Yes |
| 9 | RT1; deoR+; L2 | Yes |
| 10 | RT1; deoR+; L2 | Yes |
| 11 | RT1; deoR+; L2 | Yes |
| 12 | RT2 | Yes |
| 13 | RT2 | Yes |
| 14 | RT2 | Yes |
| 15 | RT2 | Yes |

RT1 = Ribotype 1;
RT2 = Ribotype 2;
L1—Lipase type I;
L2 = Lipase type 2;
Deor+ = DeoRepressor positive

### Example 3: P. acnes Viability Assay

[0282] Viability of P. acnes was assessed each week over two months of storage as shown in Table 4. At least three samples were tested at each time point.

TABLE 4
Assessed P. acnes storage conditions

| Solution | Temperature | |
|---|---|---|
| 25% glycerol in water | 4° | C. |
| 50% glycerol in water | 4° | C. |
| 25% glycerol in 75% PBS | 4° | C. |
| 25% glycerol in water | −20° | C. |
| 50% glycerol in water | −20° | C. |
| 25% glycerol in water | −80° | C. |

[0283] Samples were prepared according to the following:

[0284] 1. P. acnes of ribotypes RT1 (TIP3A11) and RT2 (TIP5G4) were started at 0.066 OD600 and grown to ˜1.0 OD600 in exponential phase in reinforced clostridial medium (RCM).

[0285] 2. A day later, cultures displayed a dense turbidity, and they were split 1:2 with RCM to produce four liquid culture (LC) samples of each ribotype: 4 RT2 LC and 4 RT1 LC.

[0286] 3. Two days later, resulting pellets and media were separated. The media of the LC was split between two tubes (˜3 ml), and tubes were filled with 9 ml fresh media and vortexed. Pellets remained in original test tubes and were resuspended by pipetting with 8 ml fresh RCM. All LC (the 8 pellet LCs (4 RT1 and 4RT2), and 16 media-derived LCs) were placed into ajar with two sachets given a large quantity of oxygen filled the jar.

[0287] 4. LCs were vortexed, split and fed fresh media as they became very turbid and large pellets formed.

[0288] 5. A day before the experiment, cultures were vortexed, split, spun down at 4,300 g for 5 minutes, and media replaced.

[0289] 6. On the day of initiating storage: LCs were split into sterile 50 ml conical tube (e.g., 50 ml aliquots of RT1 or RT2), avoiding the pelleted cells. Conical tubes were vortexed lightly and OD600 measured. Optionally, LCs may be diluted if OD600 is greater than 1.0.

[0290] 7. LCs were split into aliquots and spun down at 4,000 rcf for 5 minutes. Media was discarded and pellets washed with 5 ml 25% v/v glycerol/water to wash the cells. Cells were centrifuged once more, and wash solution discarded.

[0291] 8. Cells were added to 8.75 ml 25% glycerol in water, 6 ml 50% glycerol in water or 3.25 ml 25% glycerol in PBS to produce live bacteria solutions.

[0292] 9. 250 microliters of live bacteria solutions were added to 1.5 ml eppendorf tubes, and placed at 4° C., −20° C. or −80° C.

[0293] Cell viability was assessed according to the following:

[0294] 1. At each time point, Eppendorf tubes were selected from each treatment, and allowed to come to room temperature. Tubes were inverted six times.

[0295] 2. 20 microliters of the thawed stocks were serially diluted in 96 well plates with RCM.

[0296] 3. Thawed stocks were also spotted on Brucella plates at various dilutions.

[0297] 4. Plates were imaged with a digital camera, and cells counted with 95% Confidence Interval.

[0298] FIG. 3 shows the viability of a variety of Ribotype 1 and Ribotype 2 P. acnes preparations after 30 days, 60 days and 90 days of preservation. Heat shock of a sample, simulating direct application to skin, demonstrated that these samples would retain reported viability if used for acne treatment.

### Example 4. Identification of P. acnes RT6

[0299] In an effort to isolate and purify health-associated strains of P. acnes, (e.g., strains associated with acne) it may be useful to identify undesirable strains of P. acnes in a sample (e.g., strains found on skin of subjects with acne). For instance, in some cases, P. acnes of ribotype RT6 is undesirable. To this end, genes can be identified that are specific to strains of interest. The following example demonstrates how this can be performed.

[0300] Identities of genes that distinguish P. acnes of ribotype RT6 from healthy strains were confirmed. Genes encoding DNA binding response regulator and phosphoglycerate kinase were identified in P. acnes of ribotype RT6, but not RT1, RT2, RT3, RT4 and RT5. In addition a gene encoding ABC transporter is absent in RT6, but present in RT1, RT2, RT3, RT4 and RT5. Sequences for these genes are provided as SEQ TD NOS: 6 (ABC transporter), 7 (DNA binding response regulator), and 9 (phosphoglycerate kinase) The presence or absence of these genes was confirmed by sequence alignment using BLAST, Megablast, (a registered trademark of the National Library of Medicine) either the whole complete genome or all of the scaffolds of a completed genome against each of these three gene sequences; the results are shown in Table 5. “Y” is a perfect match for the entire sequence OR >60 bp continuous perfect sequence alignment. “N” means there is <60 bp perfect alignment. The best match of a “N” was 26 bp.

TABLE 5
Characterization of exemplary P. acnes strains

| | | | ABC | DNA binding | |
|---|---|---|---|---|---|
| | Ribo- | recA | trans- | response | Phosphoglycerate |
| Strain Name | type | type | porter | regulator | kinase |
| HL002PA2 | 1 | IA | Y | N | N |
| HL025PA1 | 1 | IB | Y | N | N |
| HL030PA1 | 1 | IB | Y | N | N |
| HL050PA2 | 1 | II | Y | N | N |
| HL096PA3 | 1 | IA | Y | N | N |
| HP3A11 | 1 | IB | Y | N | N |
| HP3B4 | 1 | | Y | N | N |
| KPA171202 | 1 | IB | Y | N | N |
| ATCC 11828 | 2 | II | Y | N | N |
| HL001PA1 | 2 | II | Y | N | N |
| HL103PA1 | 2 | II | Y | N | N |
| HP4G1 | 2 | II | Y | N | N |
| HP5G4 | 2 | II | Y | N | N |
| HL002PA1 | 3 | IB | Y | N | N |
| HL005PA1 | 4 | IA | Y | N | N |
| HL007PA1 | 4 | IA | Y | N | N |
| HL038PA1 | 4 | IA | Y | N | N |
| HL045PA1 | 4 | IA | Y | N | N |
| HL053PA1 | 4 | IA | Y | N | N |
| HL056PA1 | 4 | IA | Y | N | N |
| HL074PA1 | 4 | IA | Y | N | N |
| HL099PA1 | 4 | IA | Y | N | N |
| HL043PA1 | 5 | IA | Y | N | N |
| HL043PA2 | 5 | IA | Y | N | N |
| HL072PA1 | 5 | IA | Y | N | N |
| HL072PA2 | 5 | IA | Y | N | N |
| HL096PA1 | 5 | IA | Y | N | N |
| HL096PA2 | 5 | IA | Y | N | N |
| HL097PA1 | 5 | IC | Y | N | N |
| PRP-38 | 5 | IC | Y | N | N |
| HL110PA3 | 6 | II | N | Y | Y |
| HL110PA4 | 6 | II | N | Y | Y |

### Example 5. Pan Bacterial Assay to Characterize Skin Microbiome

[0301] Robust pan-sampling of the skin microbiome is demonstrated in the following example. This can be performed with or without the use of preservatives. This method is compatible with qPCR analysis and does not require DNA purification. TaqMan qPCR assays were used to quantitate most bacteria collected from the face. Performance was confirmed with two different bacterial phyla, all Propionibacterium and Staphylococcus. This method required the assessment of only a single locus to recognize most bacteria commonly found on the face (P. acnes strains and Staphylococcus), whereas current methods in the field use multiple primer pairs to achieve similar coverage. The majority of the bacteria on the skin of a subject's face is described in the following Table 6.

TABLE 6
Bacteria on Human Facial Skin

| | P. acnes | P. avidum | S. epidermidis | S. aureus |
|---|---|---|---|---|
| Kingdom | Bacteria | Bacteria | Bacteria | Bacteria |
| Phylum | Actinobacteria | Actinobacteria | Firmicutes | Firmicutes |
| | | | Bacilli | Bacilli |
| Order | Actinomycetales | Actinomycetales | Bacillales | Bacillales |
| Family | Propionibacteriaceae | Propionibacteriaceae | Staphylococcaceae | Staphylococcaceae |
| Genus | Propionibacterium | Propionibacterium | Staphylococcus | Staphylococcus |
| Species | P. acnes | P. avidum | S. epidermidis | S. aureus |

[0302] A portion of a 23S sequence from bacteria commonly found on the human face was aligned with known sequences, see FIG. 4, and SEQ ID NOs: 33 to 43. Despite two Single Nucleotide Polymorphisms at this loci (denoted by bold and underlined letters), careful placement of primers (gray and black) and TaqMan reporter (white) enable quantification of widely diverse bacteria from both Actinobacteria and Firmicutes.

[0303] A standard curve for all assays was generated with P. acnes. Percentages of health-associated P. acnes were computed using a dilution series with S. epidermidis or pathogenic P. acnes which were used to quantitate a percentage of health-associated P. acnes in a collected sample. These percentages were determined by measuring deoR+ or Cas5+ bacteria in the overall sample of bacteria (PANBAC), see, e.g., FIG. 5.

### Example 6. Determination of Percentage of pIMPLE Plasmid

[0304] The percentage of pIMPLE plasmid was determined from biological samples.

[0305] Biological samples were collected and grown in 200 μL of liquid culture. DNA was isolated using QIAgen's DNeasy Blood & Tissue kit, following the manufacturer's instructions. Paired-end DNA sequencing (2×300 bp) was done on an Illumina MiSeq using reagent kit v3, following the manufacturer's instructions, yielding 200,000 to 600,000 reads for each sample. Initial analysis was performed in Illumina's Basespace Sequence Hub, all reads from each sample are aligned with a BWA Aligner to pIMPLE. Alignments were interrogated with the Broad Institute's Integrative Genomics Viewer and confirmed using Biomatter's Geneious version 9.1.

[0306] The percentage of pIMPLE was determined by the percentage of total sequencing reads that aligned to pIMPLE plasmid from HL096PA1. The percentage of pIMPLE was also calculated as the coverage*copy number. Using these methods, the percentage of pIMPLE in the different ribotypes was determined as seen in Table 7.

TABLE 7
Presence of pIMPLE plasmid in different P. acnes strains.

| Ribotype | Strain | % pIMPLE |
|---|---|---|
| 1 | HP3A11 | 0.23% |
| 1 | HP3A11 | 0.24% |
| 2 | HP5G4 | 0.26% |
| 2 | HP5G4 | 0.24% |
| 2 | HP4G1 | 0.26% |
| 2 | HP4G1 | 0.25% |
| 4 | HL045PA1 | 3.62% |
| 4 | HL045PA1 | 3.22% |
| 5 | HL043PA1 | 4.32% |
| 5 | HL043PA1 | 3.75% |
| 6 | HL110PA3 | 12.94% |
| 6 | HL110PA3 | 12.59% |
| 6 | HL110PA4 | 13.19% |
| 6 | HL110PA4 | 14.06% |

### Example 7. Genetic Modification of P. acnes

[0307] In order to improve healthy P. acnes clones, the expression of a gene in the porphyrin synthetic pathway was knocked out. This was accomplished by inserting stop codons in the middle of the open reading frame of the gene HemY (protoporphyrinogen oxidase, EC:1.3.3.4 1.3.3.15) in the P. acnes genome. Briefly, the RNA-guided DNA endonuclease Cas9 (CRISPR associated protein 9) was targeted to HemY with specific CRISPR RNA (crRNA), and trans-activating RNA (tracrRNA) cleaving a double stranded break at the desired location in the HemY gene. A specific sequence was inserted at the site of the cleavage with a Homology Directed Repair cassette (HDR).

[0308] The Cas9, crRNA, tracrRNA, and HDR donor template were introduced into P. acnes using electroporation to transform the cells. Cells must be electrocompetent before undergoing electroporation. Electrocompetent P. acnes were prepared by growing them to stationary phase and washing them in a buffer of sucrose, magnesium chloride, and monosodium phosphate.

[0309] The tracrRNA and crRNA were duplexed using IDT's duplex-forming buffer. Then the tracrRNA:crRNA duplex was incubated in a solution of Cas9 and phosphate-buffered saline, forming the ribonucleoprotein (RNP) complex. The RNPs, HDR, and electrocompetent P. acnes were combined, incubated on ice (transformation culture) and transferred to a pre-chilled BioRAD electroporation cuvette. The transformation culture was electroporated using a BioRAD Micropulser. Rich Clostridium medium was immediately added to the transformation culture and transferred to separate container for a 24 hour, room temperature incubation. The transformation culture was evaluated with qPCR (see FIG. 6) and spread out over multiple Brucella plates for a final 72 hour anaerobic incubation at 37° C.

[0310] FIG. 6 compares a qPCR result from cells transformed with a 921 bp (921) or a 123 bp HDR. Each sample was evaluated with primers that recognized either the inserted sequence (Insert) or the untransformed or wild-type (wt) genomic sequence. Note, using the longer, 921 bp, HDR transformed a greater percentage of the cells. The ‘921’ sample had more cells resulting the leftward shift of both Insert and wt lines.

### Example 8. Packaging Compositions of Bacteria as Swabs for Topical Application

[0311] A packaging system was created to store and deliver therapeutically effective doses of pharmaceutical probiotic compositions disclosed herein to the human face. These devices need to safely store and deliver approximately 4 milliliters of P. acnes in a pharmaceutically acceptable excipient, anaerobically. Furthermore, these systems were amenable to storage at temperatures as low as −80° C. The packaging system prevented contamination of both the probiotic (by the environment) and the environment (by the probiotic), minimize exposure to any air, and enable easy application.

[0312] An example of an aforementioned package is shown in FIG. 8. Briefly an approximately 2 inch diameter circular cotton pad was placed in a laminated polypropylene bag. Three to five milliliters of P. acnes solution, at ˜10⁹ microbes per milliliter, was aseptically applied to the cotton pad. Almost all of the air was evacuated, and the bag was thermally sealed in a chamber vacuum sealer (Vacmaster VP215). These packages were easily opened and the pad removed for application of the probiotic or measurement of recovery and viability. Near quantitative aseptic recovery was achieved by centrifugation of the pad in a 15 milliliter conical tube. To confirm that the cotton pad, polypropylene bags and high vacuum do not compromise viability of P. acnes, or retain P. acnes, samples were collected from four different conditions and determined CFUs/milliliter by plating and counting colonies. FIG. 9 compares recovery from P. acnes samples stored for one week at −20° C. in either an Eppendorf tube (control), or in our packaging in a residential frost free freezer, a laboratory freezer or in the lab freezer with only a light vacuum before sealing. Large numbers of viable P. acnes were recovered from all conditions.

[0313] Alternative types of pads and bags could be employed for such packaging. For example, if a polyester pad is used, heat sealing could affix the pad to one side of the bag providing a shield and handle to enable application of the liquid therapeutic without mess and exposure to the hand. Similarly if a peel-open pouch is used, scissors would not be necessary for clean easy application.

[0314] While preferred embodiments of the present invention have been shown and described herein, it will be obvious to those skilled in the art that such embodiments are provided by way of example only. Numerous variations, changes, and substitutions will now occur to those skilled in the art without departing from the invention. It should be understood that various alternatives to the embodiments of the invention described herein may be employed in practicing the invention.

The application's sequence listing, which the Patent Office published only in electronic form, follows.

SEQUENCE LISTING (434 sequences)

SEQ ID NO: 1 - DNA, 1019 bp, Propionibacterium acnes
  source 1..1019: mol_type = genomic DNA
gggacagcgaccggtgaagggtccgctgggagcaaggggatcgtcagtcggtgtctgcaggctgaaggggcgcttggatgacgtggtgtccgctccggcggaaggcaccgagcttctcgctcagctcactgttcgacgactggacggtgacgatccccgtccggggcggtatcgatgcccaatatggttcgctaccggtggtgaggatcttggtgggatcagcgaggatccacgacgtgcgagcccgcgtcatcgcttcgtgtttgaactcgacggactccaggagtgggcagttgagcccgtcggtcgcagagactgcgtcgcagccgatgaacgcgacatcaggggtgatgctgcgcaggtttgatgacgcccacggtcccagaaggcttccgctgtgctgccttaacgccccgccgagcaccatgacgttggcggtgccttcggccacggcctggagcacggacaggccgcctacgaggatggtgatgtcgttacgagtcgacagaaggcggcccagtgctgcggtggacgttccggaatcgagcagaactaggtcactctcgttcacgaggtgtttggcggcatatgtggccattgctgccttggagacgtgctcgcattgttccttctcgtgccaggtaggctcgtgtcgtcggatcatgacgtctcccccggaaatcttccagatcttggattcatccgagagggcatcgacatcgcggcgaatcgtcgatgtagagacaccgaacagttgggaaagatctccgatggactccgagtgccccaaagaacgcagatggtcgacaatgtgtcggcgtcgggcagctgtcgccgtgcgcggctgtttgggtgttgtgctcatggtgtcttgatcggtgacgtggtttggctgatccaatttgaggaccgcctctaaggataacccagcggcatcactgctggactcggtctgtttgggtggtcggtccaagaatttctcaggtcacaggctaataaggttacctcgtcggtgcact

SEQ ID NO: 2 - DNA, 55585 bp, Propionibacterium acnes
  source 1..55585: mol_type = genomic DNA
tgccgacgccttcggcgtcgggtgagcgcgtggataggcgccccttcggggcacctgtaagcctgtatcgctgcggtttacagccttggccacccaaaggggcagcaaggggcccggagggggcattctgcgccgctgatagcatctcacatgtgagttattctctcaactatccttcaagtcaagcgtattagattatttatctagtactcttgacagtccgtctatcgggctatatatttataagcagaacgagagatcgggaaaggaatcaacgatgaagtacaccgcacacgtcaacatggtgaccaagccctacatcggacttcccactacccgaaccccctacaccctcgtcgacgccgactgggccacaacatggatgatcgacgaaacctacgaagcccactaccacggcaccagcgtggagatcagcatctacggcgaaggccccaactgctccgtactcaccaaccgcatctacaccgaccagcccaccgatgtgaccgctgcactcgccaactacggcttcaccatcgacaccaccaacacatccaaaaccatcctcacgctcacccgcacagccaccatctcccacctactagccatcctcgatggcctaccccaagccgaggggactcactggctcaacactcaacccgacctccaccacatcaccctcgacgactccaccaccggctgggccaccaaccgcaccgacgacaccgacaccggcgtctgctacgacaccagcacccacaactggcagatctgctgacagcataacgggcctgcccttgaagggttggactctgcacccatttcagccgggtacgttgccggctgggcgaaggaagcagacggcgccgcgattgaagctgccgccgagcacgtcgcgaagacctcccacgcgattgccgaggcgttgcagctcaccgcacagtgagccccacggggcgaccggctcaccccggtcgcccctcaccccccgacaggggaaccgttcccgccgcctgaatctccatacccctgatacgtactacgcggggtcgaggagtggactcccccaccctcgtgtagtacactatactacacagtcattgaggatagaggtgacgtcatgagtttttcgatccgtttaaccgaccatgagcgccgcttagctgattcctacgcccgcctgcactcgcagtccctgagtgaggctttcaagcaagccctcttcgaccgcatcgccgacgagttcgatctgcaagtagcccgtgaggcactcaccgactacgcccgcgacaactaccagtctcgccccatcagcgagctatgggacgagtgtgacctatgagctggcagatcgaaaccacgagccggttcgataaagaattcaaaaagctagaccgctacacccaaaaactcattcacggctggatcacgaaaaacatcgacaacaccgacgatccccgccgccacggcaagcccctcaccggtgatctttccggactgtggcgctaccgcatcggcgactaccgcctcatctgcacactcaacgataaccgcctcaccatcctcgccctgtccatcggtcaccgccgcgacatctaccgataagccgttgcaagactgcggcgtcgacaccgccgggaccctggcccaggccttgggcctggaggaggacgagagcgaggagcacgccgcctgagcggtcgccggcacttcccataacagcaccggtcccggcggcccggccccgcgtctggtgctcggaccgatgccggcgcctggcctccgacgcccgccggggccagcggctgggctacctcgacgtcgacgtacaacgggccgaacgaaccgtgcgctgatttaccaccgcttccgcacagagaacatgcctctgactaggagaaatgacgttttccacagggcctctattactaatatccctattatctctatccacgcgcgcgagcctcagcgttcaagcttcaggtcttgctcgtctccctcgcgcctcgctgcgctcgttgctactgccgccccacccggcaagccgggtgggttgccatcggaataccgtggaccatcccggcgcatacacccagacggtccaagatccaatccacgctcacccgcgacgccgctaacgatcctcatacaccgtagatgccgttctgagagccttccagacccgcacgtgggtttattgcaccgagacccaaatcccctcagaagcgatcctgaaaccgtctacgccccatttccgacggacgctggacaggctgggcggcttgtctcccgccgcagacatggccctggcatatgcggttgccgactggtgggatcagggattggatcacacggcagacggctggtccaaggcgggtgtgcaggtgcggtgagcggcagacgtgaccggtggggtgcactgtcatggccgggcatctgccgagccaccatgcgggccctggaccaggaggcagcccgctgcgaggactgggggaagacggcggcacggatgggccgtcgggatgcggcggccgaattcaccgagactgcggtgcagcatcgtggacagatgcaccacctcatgtcggcacaaaaagtgtgggtgtcgaccgacatggtgtcggctacactggacgccgcaggagacgtgccgagtttcgaggccgtcgacgtccctgccgccgggctcatgggtttggccagccccctgccgccggttaccctgcagcatccgctgtatctgcgcagcgacgagggtgtgacaaccttcactgatccggttctcgtcgacgcgctgggatggtggatggattctgggcgtgtgcacgtggtgatgtgcacacgcacaccccggctgcccaacccggtttatgcggtggcctccccactgacggtggtggagaaaatcacggtgcccaccggcatcgagttcgagaccatggagtccaggatcctgacccccggcggcgtgacaggcgtctcacggcagggcacacgcatgatgatccggttggcgtcatggctgggtgccgcgtgggtgctcatggcgactccgacggtgtcggagccgcaccctatggatggccggtggggaggcccagcaacggggcagacccggccgcgtgatcgggtgaccgtggtcgacatgcggcccatgaggcaggtgcacaccaccaccgaccccaccggcaggcggttgacgacccggcatgtcgtgcgaggacactggacacaccaaccctacggcccggcccgcagtctccgacgcctgcagtgggtcgccccattcatccgcggccccgaaggggctccgttcgtcggcaccgacaccgtcaccgtatggcgccgctagatacgcgggcgcggggggttgacgaacgatgcccccctctttgtgttgtgatcagtcgtgatcggcgggttttaggtcggggtaggtgtcgagaatggccttgaggacgaggtcttggattgtggtgtcattctgggctgccttgaccttcagtccaacgccgatgtcccgggggattctggtctgcaacttgaacaggtctgcctccttggttttgaacagtttggctgcagggttggcaacgggctgttcttggcgctggcgtccaaggttgcttttctttcgggcggtcatgacatcatctccaacagttcgtcggcaacatcggcgaagaaggcgatagtttccggctcaggggtacagccgtaggcgcgcttgatgacttgacgcttggggatgacgtgatcgaccaactgcgtctgggagtcgttggctagaaggtcgcgaccttccttgaacagggaggtattcggttcagctttggaaagcagcaccacgcgcggggttcctgcggcggcgtcgtgcgtctcccaggtgcgcgccatgtcgagcccggacgtgtcggtggggatgataaccagatcggcggcgcgaatggcggcggtgatgatgtcaccgttgcccggcggggtgtcaatgatgacaacttcttcgggtccggcgacgaggtgctggagcgtcgccttgttggccggttccacggggaaccccaaggggtcggcgttactcagtgtgcactcggcccaggatgatgctgacccttgagggtcggcatctttgacgcggaccatacggcccgtctcatggagagctgcagccagcaggatcgctgccgtggtcttaccgacgccacccttggcgttgataatgctccagatcatggtgacacctttcagtgaggatgcatatcagtttacctgcaaggagtaaagacggcaagcagttatgccgtttctgcggcaagccgtcttgcatccttggatgtatagatagttgtctacttatggttgtggatcgtggtgtctcgtaccaggatttagtgtgctcgctgatatgcacgactttcgggcggcctgatctggcggtggtgccactaacccaggagtctgatccgcaaggtgtcctcgactttgaggaaggggtctctgctttcgtgttgacctaaagtcaacggccctgggcgatcactgaatcctaataactttgtatccttccctgattgcatcttagcatccttgaattcaaacagggatggagccatgctgttttgacgacatggatgcactggggtttggttgttgccgatgcggagcgtcaggcggcccgggacgccgccaccgccgacacgctgcgggagatcgtgggactgctgggccggggcggcgaggtcccgcccgccaagacggggcgtaagacgaccggcaggccggccccggcccgcaagtcgtcggccacgcagtaaaggcagggatccgtccctacgcagagagcggaggcagatcctgggggatccgactcttcggttccgtgatcttcccggagatcttcccggatcccccagggctcatcctgatacggggtccgccgacggaccccgtatcagtgggggcgctgccaccagtgatggcgggcgggtcggtcggcgtctaggccccgcccgatggtcgcctggtctacctcgcaggcccgtgctgttgccgaggccgagaacgtctgcccacttgttgccgattcagtcccctctccgtctgccatgtcgccaacctttcctatctggcgtgctcatggacatgcccgggcacgccctcgctgctcagaggcctgctcgttccacctctggccgcgaaccgtatttctgctgaccactcctcgtgcgtgaatatttgccagccttggccattcatatttggactactctgcaccagatatcggactgggaaacctcttgcacatctctaattgtcatctattcgttgggcgcgcgctgttagatcgtgatcataccaatcagaagacaaagcgacgcccttttgagcggcttttcgaacgattctagaccgcgctatatcagcatttctaccgcgcggccagagtgctacactaaattcctctctgcaatccttaagtccattctttacttcctcatccaatttctgcgacagcatttttatggaagcatcgcactctgactcatcatcaaatgcctcaattgcgtgcgttcgccattcacggcgcgtattatcgtagccgtaatgaagtattacccaccgatccacagaatcatcgttaggatctacaactgtcatgaatggcccaactctcgctctggtgtattctcaattgcagttcagtgactttacttgaccagtcccggatttagtagacgtagacggagagtaccccgccgggaacttgactgacatcactgctgtaccgtactgctttcccgggtggcaaccatcgtaagcagcatttgccgtgacgtacctagtgctctttctctgagtgccggtaatcgccttatatggtacaggtgggtgaatcgtagccgttacggctaccgatgacacgtttgcatcacatgaagctgtggcgacataattagttgtcccattgacatgatgagagtcgtggacatactgtcgaggatcgagagtgcaggttattgttgacgccgttgttctggtaccagctgctttcgagctctttgttgcagttacagtctgcggccctgaaggttttactgacgcgactgatgtgttcgcgtgttttgcggcagtgctttgatttggttgtgcttgtgtagcagttgctgatgtcgccagtgatgcccccattaccatagctgtgattatggcgtagtctttacgcttcattgcgcccccaaataagcatgttagtttgctattttgaataggaaacgagacatcgccatgacttgtcaagggcagaagtagaaagaatcggggggtatcaagaaagatgtgctttcatcaggacgaaagcggatgggtccgttcgacttggtgacgaatgatccggccttgcgtcgcggagaccaggccggcgagtttgtcgagcagggccgccgtggcctcatcgtcgggcacatcactaaagggacgaacaaccatgacggctagggccagaaacgaccggaactgaatcgcatgtggacccccatctggcaccaggcacacacctaccgaccggaaaccctgcaccctgtcgctcccagttcacctcctaatatgcgcctatagtctgtgctagtagacattattttgtgtgttgtttcccatctggcatgtctggccccggacccgccgcgacacgcggtggtggataacagaccaggacccccggaccatagagaccagggggacgagacagtcccccggtgaggatgtctcgatgtgcagatcaggaacagaatcgccgggcacgacccggcgccggtgccggtgcagtgaacccgtggcccatcgactccacgaacgaacgtctcgccttcctcaactggtgttggcggcaaggctactcagcagccatcgtggaaacgatggacgccgcgggagcctacgaccacctcgacgacgaccagaccagcaaccagcacgactaacgccgctcccagcacgggggaaggcggcgcaccaggtgcgccgccttcccccgtgctggtgtctcgtcggcttactggtgggggtcgtaggggaacccgtaggtgtgttccagggccttgcggagaaggtcgttcatagttgtgtgttcggcgacggccttcatcttcagcgccgtgtgggtggcggtgggtagcttgacgttgaacgcggtgatcggggtcttggccgactggaaggtttcagagacactggctccctggctggccgccatttggtcggcgtaacggctggctttgtcggcggcggtgggtttgcggttcttactcacttcagcatctccttgattcggtcggcaacctgggcgaactctcctagatctgttggccgggttccgatggcttgccgataggcgacccgtcgatgaacctccgcatcgagaacgtctaggccctcaacggcggcggccccctcgtgggcatcacggtattgcctggtccaatcggctttgttgaagagcagggcccggcgtgtgccgtgggccacctggtaggtcattagcgctcggtccatgtccaggtcccccgactcggtcgggatgatgaccacatcggcgatgtcgagggctgcggtgatcgtctgagagtcaccggggggagtgtcgatgatgacaaggtcggcgtcgatgtcacggcagcgcctgacgataggggcattagccgggcggacctcgaagcccagcgggtcaccagtctcgaaagcgtcggtagcccatgacgtcgccgatccttgcgggtcggcgtcaagcaagatgactcggtactgagctgctaaggccgttgccaggtagaccgccgtggtcgttttcccgaccccgcccttggtgttgacaatagaaatactacgcataaatacatcattacacatgtgcatcgatgtatctgtatatatgtgtatcggcgtgttgtgagggaaaacccgggccacatacaacgatcccccagccaccacagccgggggatctctcagtaaagccagcaactcccacagaagttgcacccccacgatacccaccacatccgtgtcaagcccccacaacacccaccagcgccctaggcttcccccatgaacattgacatggacacaccaaccgaaaccgaagccgacaccttcgatgccgtcctcgccgacattaaccacatcaaccgcctcaccgccgacgaaatcgagtgctactccatgggagcctgtctcctcctcctcaaccaccaccccttctccgaactccgccaacactgggccgacaaccccaccgacgaaaccacgtggaccctctacggggccatcatcgccgcctccaccctggacccccacctcagcatcgacgccctagcccgcctctaccagctccccctcgacctcgtgacccaagccctcaccgtctaagcgtcgatgagcgggggagaggtagcgcactatcggctaaggaaccccacaaacaccaaacccttgtcactgggaagggtttggtgttatgctggtctcacaactcaacagaggaggtgagacatgggaaatgagtaccagaagtcgctcaaagtcctgttcaagaaactggaatctgagcaaggagcccgcatcgagacccggcgcaaaggatggatgatctacccgccggatacgtcacgatcagcggtcatgatccacaagactccatcagatcgcagagcatgggccaacatgctttccgaactgagacgctcaggattcaccgtctaactcagtgaagggggctggagctccagccccctttcaaccacctcccccggacaccacacaagaaaaggagaacatgatgtggcacgttcggttgtcgcttcgcgcaatcagcgaggacatgctgttcgacgccctggacaccctcgaccccttatccccggtggccacactgggccccgatgagcacaccggatcattggcggtgttcgtcgaggctgactcactgacagacgccatcgagactgcccgcacagccatcaccaacgcatgcaacaccgccaccataaccggcgtagaagcccgccccgaagacgaatgcttcgcagacgttgaccggcccctgttcccgccagtggtcggatacaccgaaatcgctgaaaccgcaggactctcacgtcagcgcatccgccagctcgcaggcaccgccgggttccccgcacctgtcatcaagaccgcggccggcccgctgtttcccaaagccgccgccgagcagtgggcgcggacacgccagcctaaggcaggccgcccaaaactccagaccaccacctcataacacatcccgtgtgctgaacctgttggccggcccagcacacacccccaggggccgggcccagcccggccccgccccacacccaaccgccccctgttgccgccgtggcgaaacgatcaggcgagccacgaccatcgccaagctgaatggagagcgagcatgagcaccacccctgccgggttcgacttcgacgctctggccgagtgggccgagagcgatgaggcgacccacaccccgcaaaccagccccgtgttccggggcaaggacgccgcgcgcgccagccgcgcattcctcggccgaggacggcccaccctcggctcagaccacgccaccggcgagggccggtcgccccgccgtcaggtacggctcgacgcacgcaccaacgcgcgactcgacgcctacgcagccgcaaccggcaccagcgcctcccagatcatccgcgacgccctcgctgactacctgcccgcctgatcccaccccaatccactcgggcgcctgtcagtgccccctcttctgggtggtggtccggggcgtcaccgccccggaccagttgggtagtcatctcagttgaaataagcgattagtgatacgcccctcatgctttccggtgctgtcatgagcgtctgacaacagcgacacctcggggcagccgacggacagtcctctggctgccgctctgatcccatgcccacggcacgaaggtgtcggacagctcggtctcgtcatgtgcccaaatagcgtcgtgggcctgtcgccaagcttctcgggagccccacacgggcacgaccgggccacaccggtgtcctggtctccagtgtcgcgacactgtcgatttcggtacgtgcaatgcggcggcggtttgacggatcgacatcccagactcccgcgcgtcccagatcgccatgtggagagtatttgcctccagtgcggccgccacacttgcacgctctcgcgcacgctcgaatgcccgcctagtgctctcaaatgtcgtcacgacgcctccccctgaaaatactcagggtgtcccacggtgggacaccctgagtatttcataccccaactcgcctcaccacacgtcgacctcgacaccgatcaagcgacccgtatcagcgacattgccgtaccgctgccccgcctggtcctccagccacgacaacgcatcccgaaacagcccgacgtcttccaaagctaaaccacagtcgtagccgcccttgtcccccaaccgcacaatctggcgctcccggtggcctccctcgtcgacctcgatccacagtttcgcgtgcatccgctggcctcggccctctgacaggatctcggtgagcaggtcggacgcctgccctcgcgcatcctcgttactgcgggggaattggagtatgtgggaggaacggtggtggggcaggtttgtgacctcgtgacgcagcaggttgcgcttgtgcatctgccgttcgagacgctcgggctgacctgttgacggggttgagccgtggcgccgcttcctcggcggggtctcgatccgttgctcttccggcggttcggcgtcaggttgtggtgcgcgatctcccctaggacgggggggctcgccacctatatccgagggacgatgagacggccttccacgcttgctgcgcactttcgcagcccgccccttgcggtcacatcgacgcggcggcggagtgacgtcctcaccgcgcgctaactgcgtcaacgccgccaccaggttggtgcccggtttcagccctttcagcacgaaccgcaccaggcgggggtctcggccgattcgtcgggcaatctcggcttggctccacccttcggctaacagggtgcgcaacaagtcttgggcccggttatcacgctcagtcactggtcgcctcctcggggagtcctgcctgctcggcctgctctgatagagcagcccgttccgatccggtctggggcgctttcaggggaccgggtaggacacctttgacacgcagtcgcccgtccttgccgtcgtcgccgcccccctgggccacagggagcgcccaggggggcacgttgctggtgtagatggcgtcgccgtggatagccagcagggtgcgggagttcatgcgtagtgctcctcccttggttgtggcgttttttccggtggtggggtcggcgatgggtgtgttgagggtgcgtacgcgggacagggcccagatacgggcggcgatttcggggtgccaggtgtcggggtcggggcggcggcgggcggtttggtattggtaggcgatggtgtcaccggttttgttgcggatgacgtcgaagccttcgatgtcggaggggatgtcgtcggcgtcgtagacgacggtggtggtgacggggttggaggccgacatttggccgatggtcacgcgcagcatgtttttcaacgcggaggtgaggattgtcgtggcggtggggttcttgtctgcccagcgtttctcggcgatgtcgatcatgtcttggatggttttgacccatcctcggatgggatcgactttggtcagtttgatccctccaaggaactcgatgggcttagtaacgggcccgtcaggaccgaattcggtgtcccagccttcgtcgatggctagtttcagttcggcggcgtcaacccatgtttcgtgggtggtgccgggcacgttgggccaaaaccatcctgctcgtcctttggtgcgtttgaccggtagtaggccgatgtcgtcccaccaggatggcacggtgaagcggatgtggtagcgggccgggtgccaggggttgttggtgaacaggtcgtgagcttcggtggcgctgagcagagtggcgggtgcggcaccgatctctccggtcactgatccggcatacatgaatcggccgtcgatgtacacgaagttagggatagggccggcaggcacggtggggcgccaaccttgttcgcggtcctcggggttgccgtcgtcgacgcatagttcgtagcggtgctgaggggaggtgtgttggatgagtgcgcccagttcggggtccatcggctccatgcgataggactcgggggtccgtagcttccagaggttgattccttctgctccggggcggtccatgagggcccagtcgcggtcgattctggtggcgatgatgtgggttaattcgcgccatgcccagcgggcctggattggggtgagggtctggccagggaaccattcatcagcgaccagaatgtcgaggttgcggtcggtttctttgtgggtgaaccggcctcgggcgggccgcccggacagcatgaacaggccccgcacgtgccagtcctggttgaactcgcgggtgtgagcgggggtgtcaggcagcagccaggattgaggctggtcggggatgttaccgcagacgatcaggcgtcgggcgttgtggtgtagcgcggttgttagcaggtctgacagggtcgcgtgcttggtgcgccgcccccctagcactggcaggatctcgtttccggccgcgtcgactccccgggcggtgtcgatgtctagccacactgtttcggggtcggggggccgatgtggggcgggacggcgctgctcctggtcgtctctcatggtttcctcctttgggccagggagcggccggcgtcgagggcgttcatgcgctcgcgttgttcttcgcgtagttggtagacccggcctcgtgacactcctgctgcctcggcgatggtggtggccggcaggtggccgatggcggcagcgtcggcaaggacgtcacgccaggccaggtcaatggttcccagctgggctagagcttcgtcgcggcggcgggtggcatcagccactacggaggcccaccctgtggggtggatggtcttgacgacgattcggttgtggcggatggggccccatgcatcagcggggacttgccagccgtgattggcggcggactcggtgatcttgaggcgtcgctcaggtgcgcgggtgcgggcagtgacgtcggtgttccaggtctggactggtacccacgtcccctctcggatgcgttcgatgacgcacgtggtgacctcgtcggtgactgtgatgaccagacgataatctttcccgtctggggtggttcggtagctgggcatgtcaccctcccctatctgtcaaatgagctagacacagtgtctatttaatttgacgcaaagtcaagtgcattagacgcctttgtgtggatccgccccaccagacaaacactcgcgcctcatgacccgccgcgaagccttaacgaaaccaaaccgcttatagaaccgctccgcagcgctccccgagggctttagctccaaggtaagaccttgctcgtcggcccattggcagacttgtgtgaggatctgtgagccgtagccctgatttcggggggcggcatgcacgcacatcagcatgtgaccatgacggcgggtcggcgggctgacataagccccaccacgccagtccggtgtgatctgccaacttcgccatgccgcagcgcgccagcggcgggcctcggtagccaccatgatcaccatgatgatggacagggttacgacgccgactatggtcagctcactccagccaggccagttcccggagatgatccagcctcccagcgcccagatgatcatggcttccacgcccgccgcaatcgggacgagtggggcagtacggatgcggcctgccatgatctcggtgatctcgctgcgatgccatgacaaggagaattcccacgactcttgaatcatgctgatgtgtgaacggcttcctcggcttcgccctgccatagcttctctagacggcgctcggctagctcgtcggggcacggcgacagcctgccgcactcggagcagaccccgaagtggcgcgagagagtgatgaccggctcatcgggagcatgaaccgattcaacgaccgggtgctgctcatcggtgagtcctgaggcgtgaccaatctcggctagacggaggtgaaccataccgtcgtagtagtcgaggccttcaacgtggaacgggtaggagccgtccgcggtgtggcctgcaaccaggtccccgacttccagctgactggcggtcatggttcgcaccggcggcagcggggtccgggtcgcgttgatcctcatggtctctccttgcttctgcgccttcatagatgaaggtgccacagccggggttgatgtgcggaaccacagccactttttcaataaatccatcaccacggtctcaccccttcccaaatgtgtaaaccgtggtttacgctttaaggcatgatcgaacacacaccgacacccgccgcgcctcgcgtggccatcatttcccctagcgggccaccacggttcttggccgagcctcccagcgccgcgctgcgacgccatggtcggacccgcatgaggtcccttcccctatcccctcacattcgcgcctgggtctccaccagcggccgtaaacccaatcccatagccaccgccctgatctggatgcataccggagccctgctgccggtgtgggacaccgccgttttgactgggcctgccctcggcagacgtgtgcgccctctcagcagtgacgccgaactgacctctcggcggtggctcgaccaggttgccgaccatcccggctttctcgacacccttatcgaggccgcccgcatcaccgatggatggcatcacgcgacgcctccgcacattcaggccccttaccggacccttcatcagtgaacggaggtacaacgacatgaccagcgacattgacattgaccggacccacaaacccgacgaccgcgccgaggctcctctttaccggtcctgggccaggagactcgtgcacgtctccgggatgccctggcgtatcgtcgccgccttggccggggtctcccccacctccatgcaccggcttctattcggccgcaacggtcgacccgtggaatggatcggcatcaatgatgctcgcgccctgatggatatcggcatcgatgatctcgcctcagcgtccaccgaccgtatcccggcccgcgaatcccgcgagctgttggtagccctgcacaccctcggctggaccgatgagcatctaagccgctggctgaccagttccgacctcgacctgaccaccgcccccaaagccctctacgtcactcgactatccgccgcccgcatccaggccacctacgacatgctcatcagccagcccgtccgccgctgcggccacccccgcaccccgcccgtctcgtccccgacccctgctgtcctaccccagcccagacccaacaacaccgaaccgttccaacccgccctgttcgagctggccgactgcgcatgaggaccctgcacagacgtgattaaatcgaagggctcaaccagtcatcaggagtcccccgtgcgtttgtaccgcgctgttctcgccgacaccgacatccatatcaccatccgtatctggaacactaccgatcgtgactggacctgggccccccttgacacttgggcccccgacccggccccgaccacaccagcccagttagccgatgaacttcaccgtcacggatggatcacccctgaggtccctactaccctcaccgaggtggctgtcatccccgagaactggcaagctttcgtcgagcatgccctcgctgtccggaaccagcaggctgaccaattgcgcgtcgccgagaacatcctcaccgacatcctcggcgacgccgccgacgccggcctgtctgtcaccgctctcgcccgcacgaccggactatcccgagtcgccgtctacaaacgcagcgccaaaaccatcgactccatgagacacgccacccaggccggcggaatcctcaccccctcctgtctcacccacgctgagagaacagcgctcggcctgcccgacgagtaacccatcgtttacatcctcgactggtccctgcgaccagtgaaccgtgcccccactgcgcccacaatgatcagcacacccacggcgatcatcaggtgggcagcactaactgatcccaacgaaccaagatcaaacaagccctgcccgggagcgtcgagcagtccgtgggcgcgaagccatgctccgagattgccaatgatcttggggatcatcttgttcagtagggctatccctccgatgccgacaacgaggaagacgaggatttcttcgcctgcgttgtttcttcctgtgtttgcggtcatgctgccttctcggggtggatggccagccagctgatgaggttgtcggtgatctgccctgagatttggatcagttcgacttgcccggcctgccatgcccgcgatgtgccggccagcaatgatgctgggacccctactgcgcggccacgggatgcaacctcagccaaggcggcgcgtaactcctcgacggtgctttcgatgtaccaactgccgtcagtactagtctcagcggcatcggtggtagcgataagagcatcggtgaggtcgtcgacggcgcggtccagatcagcgatgtccggtagggctacaggagtcatggtgtgtcttccttctagggtgccttcactggtgaagggtccctagccccggccgatgtgcggtgctgtgggaaaaatgcttcccattggtccgtcttagttaggaaacttggcctaagtgctgtcgagggtcgcgtgttcgtgaccggttcgaagacactgccgccttgtcttcttgcccgtggcgcttccgagatggtcagtgggcgatggctaggccgatgagggcgccgctgcacaggctgggcgcccagggaaggaatcgggtggtgtggtgtcggaaccggtcgattagggcatatagggcgatcagggtgaggccggctatgacagtgacctggatcgtgtcgatgccggttgctgcggccggggctgcccacagtggtgtgatgcgcacatcagagaaaccgaatccgcctcgggagatgagccaggcgatcatccacgctgcgaagatgatggcggtagcgatgacagcacgtatcgccgcagtatggtccgagagggcggtaacgactacagccccgatccatccggcccatccggtccacgctaggactgccggtatccatgtggtgatggcgtcaatgacggcaacccatgccccgatggtggctagcagagcccaggccggccaggtgggtgctggggcccacgctacggcggcgatcatggttgtcgcagatgcagcacagacagcgatcaagcttcggaggctgtaggtgtcgcggtagacgatcttgtcgggattggcggtagctggttctggcaggacgcgggtgagggcaggccatcctgcgaccgcaatagccgcgacggcgaccacccacacaatctgttgcatgggtctcatcatggcccatcatcgatgagtatgggtggccgacatggggtcactcgtagaggggatcgaggggtgtgcgggcgagcatggcttcctgtgtgccgagcatgagggtgccagaatcctcgccagccgattcccagtcgacgatgacctggtcgccgtcaacgctggattcggcgatggtcacccattctccgtcgatattgatgagcaccccagcggccagctccgtggcagcaaccgggtgaggtgggttgtagaagcggtcgatgtcgcaggcagggtcgtcgggttcctcgactaccggaggtggggtcgatctggctgtctcggtgtcgtcggccaggtcggctcccaggatgcgctcccattcggggctggttttcttgcccgctgaggccatcgtctcgtcgatctgttcgtcagtgggccacacaaatttctttttggtccaggtcgtggtgtcgggtcgcagctgatccagcagttccaggtcttgcggggagtgggccttgcgggggtcgggggtgtagaagaattggacttccttgggggctgattcgccggataggtaggtgccgcggccgcgtttgccgaacgggatgcccacgccgacgtgttcggagccgaacatcatgcgggctccgtcagcggacaggggtccggtggcggcacgcccggagaagttgtctcggatttcgccgcccaggaactcggcgtcggggcgttgggtccccagatcgacgtggatacggcaggcggctgccatgcgcagcagggagccgatccagccgaaaacggggcattctccgggcatcccagagaccttgatcgttgaccaccagtttttcgcgttgccgtagaactggcggtactcgtcgatgaggaccagcacgcgggtgaagtcggtctcgcgggccccttcttcttcgatgcggcggtagcggtcctccatgagagaccacagccagtggatgagggcgacctggtcggggacggtagtggcgaccatctcgatgttgggccactcccgcaggcccaggtactcgatgcgtttagggtcgatgacgaagacgcgccagttgcggcgggcaccctcgacggcgtcgccgatcatggacaccgtttttccggtacgggtgcggccggccttgagctggtgggccatgacaccggagatgtcccagaaacaggtgttgccgtcctcgtcgacggcctgggggattttctcccagtctggggagtctgggcccggaagggccacgggtcggggcaccatcgagggcagggggtggcggcgggtgacggtgatggtgtcgtgttccaggtcgaagtcgctgcgccactggccgagcatcatcgccgaggtcaccgcggccaggcgcaattggatgttcgggctggacaaatgggcgccacgttggtggtgaatggtgaagccgtccaggttcccccgatcggttttccaggaatcgacggtgaccgccgacccatagatctgagtggctacttctttagcccgttccttgtctcggtccagatcggttttgtcagggtcaggggtcggggcgcggtattgcaggacgaaccggccggccgggatcgttgcggatgtcaccgtgaactctgccggcgaccaggcagccgcggccgcctgggtgagggccattggcatggtctcgacggcagcctcctcgggggggatggtgagggtcaggcgtcgcggatgcgtcttcttgcgattccatgtgactttctgcctcaccggcaccttcgccgccgactgaatggctaggcgagctgattcggcagtttcggtacgccggccagcgcgtagcgcccgtcgtgcgtgaaggctgcccaccacagcacagcccatacacggcagccacgagcgcggatcagcggctgctgcatagcccccggtagctagtaccgcacctgaccagccggccgcgatacttttccacgccggtttcgcgccaccaggaccagcgttatggacggtctgcttcgaggctgcggagggacgagacagcggagtgctggtcatgccgcggcctccttgtggcaggtcatttcacaggcatgccggccagcgatgatgccgtggcgcaccgccccggtagccgcatagaccgcgcacaactcaaacacggggcacccatcgcaggccgccgggttcatgctttctttgtcccacgatggtgggtcatcggtgcacggcacggccaggccatcctgttgagcggcgctgatagcggtgaataggcgcagctgggcgcgaacttggtctggggtcaggttgacggtgcgggctacacgcatggggttccttcctcttcaccagtgaaggttccctagacccggccgatgtgcggagggatttcagtgttttatcgaggtgaccagccagccggtctgcgctgcgggttcaggtaccagggtcagatgcagcatggtgtggtcggctaggggcacggcgaccaggggcccgtcggcgctcgccccggtgagggtgggagttccggccacggtggtggcgggaatctggttgggtttcgcggccatcagggagcccatgagggtcggggcggcgatctggacgagggcgactttgcgggcggcgggatcgcgggtcaaccagccgcgggtgaaggtgagcgcagccgacgtgatatcggggctcagcggggctggtgtggcggcggggtgggccgttgaggagggccatacgcgcggtagcgctggcgacatcgagcgggtcggagtggggtcaggtgtggggcttagggtccgatgtggcgatggggctaccgccccggtggtgggagacgagactggttgggggtggtgttgagggcgtgggatcagggtgaaggcagccaaactggccgggatgaggatgacggccgcgccgacacttcggagcgaggtcatgtgacgatccttcggtagctcgacgggttgccgtagatcttttccacgttgatgccactatgtgggttgtcggcgctaaccatttggcctccaccgatgtagacggccacgtggtgggcagggcttccccagaggatgaggtcgccgactttgagctggtcacgggccaccgcggtgccgactttctgctggtcggcggcggtgcggggaaggctaatgccgatacgccggtacagcgccgaggtcaggcctgagcagtcgtagccgccatcggctttgccgttgccaccccacacgtaggcgtaggagttgttgtcggcgatcgatttggcccatgccacggcttcggccaggttcttcgacacaccggtctcgttagcggccccggtggcacagttgtttgacaggtgccctgtagtagtggatcccactatttgtttggccatggtttcccatttggcgtaggcatcgggcagggctgagccttgcactgcctgagctgcctgcgtcagcggcatcttctgccagtcagcgatgtcgactaaaccgggaatgtggaatccagggccgccggccgatccggggccagcgtaggtgatggtgtggcctttcaagaacgcctcggtggcgtaggcatcattgttgacctgatccagagtcccgtaccagcccggcaggatgcgctgctgaaaggggccggcgtcaccgtcaccgttagccttcgctgaggtagggtcggccccaagatctgattcttgtttggcggtcataatagcgatgaccgctgcctgggtaggcagtttgtcacgctggaccacagtgacgatggtggtcacgagctgcttctgcctggccgtgaggcctccggcacccacagtgcctccggtgacggtacccacgcaagcatccccgccgacactgccaccgccgacgccagagttgtcgtcgagggccccagagcctactgacagcagcggcacaatgatcacggtcgcgggcaagaccgccaggcccgccagcatcagcactgctgcactcaccacggcgatcacgtgagatgctttcaacgctgcccacctttcgctggtttgagggggcgacgcctgctggtacgcacaggcttggttggtccagtccgccgttggttggcaggcctgggtttgatcggcttgctgggacccggtttgggctccggagtcttaggctccggcttcacatgcctaggcacttcggctgcggtgggaggagtcagcacgtggcgtaccggcttggtgaccttctgggcacccgaaacaaccggcttagacaccaccttggcacctttgaccaccggtgcggctgccttcgcgccggccttcttgactgcacgatgcgctttgatagccccggcctcggcccggccaaccctgctagcagtagcatcgagggctctgtggcccgtcgttgccctcaccggtgcatccttgccctggcgggtctgcttagcgatcgccgacatgccgcctcgcaatgccgaaacatgattgtgggcgtgggcgatcgccgacatgccggccgtcgcgatttttgactggccctgcggggcccctgccccagcacgaatctgctggtaagccgccgacgtgccacgagcacccgccgccattcgcgccaccttcgcagccctagtcactcccgtcgacacgccacccgtggctaccgcagcagcacccgagaccacagtcgaggccatccgccttcgacccaatccggtgagcttgcgaccaccgctgcgcaccatccggcgagcaccccgcccagcccactggccgatcaccgagcccctttcggaacgcttgctgcgcatccaatcgttgatcttgtccctcagccccttctcgcccttgtgacgacgccacatggacatcaagaacccgataatccccacgagctcgagcatgttgacaaccatgaccttgatggcgacatcaccgtcagaggcgaaaaccgacttgatgatgagcatgaccacacccaacatcaccatcgacccgacaatgccgatcatcgagtacaagatcgaacacagatcccggatgagcggatctgtgcggccagggatagcccgcaacacgttgagcatcgacatgaacgccgaccacaccaacttgcacacgtagaaccagcacatgcccgcgaacaccagcaggaccacagccaaacccgccaccgtcgacgagtaaaagaagaaccccaccaaccacgaaccatccgcaatatcgccggcgtaatccgacaacccctcatcacagtcaccaaggtcgtcgcgagcatccgagacgtcatcgtaagggccacccttgagcacctcgatgtacttgtcgtggcacttcgcatcaataatgcggccatagttgagctgctgatgaaccggcgccacgaacgagtccacaatgatcgccgacagcttcggatccttcgagtctcccgtcgaggtcatgtcatcaggaatctcgacctcaccagcggtcgccgtcgcaggatcaaccgaactggtaatcatatgagacagcgccacaccgaactgctgggtgcgagccagcggagtagccaacgtcgtcgtatcgcctgcgaacttcgccaccggggccgccaagaaacccaacgccagcgccgcagcaatcgccgcacgcgcacccgtagcccacgcccctgccgtacgtcccctcatcatcttgacgaccacgcccacaccggcgcacgtcgtcagcaacgtcaacaccgttccaccccagctgtccgctcccagcggggccaaaaccttgtcgtggatgtcgttctgtaaccccaccagcggtccggtaatccacccgacccagctcatcgccacggtccagtccaacaaccggcacaacagggcaatgaccatcaggtacgtgttccaacacatgccaataatggaggcccacatagccttcagcggggccgtaacgccaccatcgtccatcgacatctggtactgaaacaagtgaataccgttggagtcagtcacattgaaaccgtcacccatccagcccagccccgggcccgatgccatggcaggcacactgctcagcgccaccaccagaaccagcgtggtgacgatgatacggaaccgccgctccccggccccggggcggcgtggatgacggctcacgctgtctcctggtcgtgctcgggcgggttggagctggcggcttcgcggtggggagcgtaggcaggtctcagtagtcgaatttcaccgacgttgccgtgttggtcggcgtacaggccacaaccggggcctccggggttgagggcaatcttgaccaggtcagcgaactcttcaggggacgttttagggtccacgcccaggaactcgacacctttctgggcgaggttgatgttgtcgcacagcaacacgatgcgatgctgaatgaggttgcggacggtctcgttggggtaatcggcctcggggtcgtgggagccggtgataagccaggcattggctcggcgggattcgcgcacgtactcgtcaatggcgtgggaggcttccggcgaggacgacatgtgatgaaactcgtcaacaatgaaagcggcgtcgcgggcccggtcgctgaagcacaccaggcgagccagacgggcaatgagcgcgtagagggctcggccaaacaccttgtgcgggggcagctgccgaaacagatgttctgacagcatctcctcggcgttaggaagagcgatgccacaagtgccaatgatgaggatgtcggcactcaggtcggcgggaggaaggtccgggtcaaagatggccgaagctagggaggccgagttctcgatgtcagcgaacacggcaatcctgtcagcgatcgcggtggcctcgggaaggtcgcactcctcggccaggtggcgggccaaacgcccacacgaggtgatctggtggtcacgcatgtaggccggtttgaggaccttggccagcgtggtcccggccacaccgatggtctccaagttaagcaaggtcagcaagaacgactgggcgacctgcccggccatctccgggggaaggatgcgcagcgggtccagcgacagcttggggtgggccgtgtcgacgatctggcgtctaaccccgtcgatagagttgacaaaggttacccactcccgctcatcggagttgtcggtggcaataatgcgcccgccccgggccgcgatggctgcgcacagccgcttctcggccatcgtcttgcccgcgcccatcttgccgatgaacgccaccgtgttgcctttctgatcctgagtgtcggcatgcaaatcgaggtaggccagcgactgcaacggggagcctgtgaccacagccaacgggatgccggtggtacggcccaaccggtactcaaccaccgggatagatgcggcgaacgcggaggcgtgagtcagctgacggtaggcgttaagcgaggaggagaaccggccaccgggccgggcagcccacagcaagtcctcctgacggcccacgggacgcacccacgtgaagtcaccgaacaccggatcattgacgaacgctcctgccagctcctcggtggtctcaaagtcaggagacgagacagtgacggtgataagagcctggatctcgacctcacgctcatcggcggccagctcggcgttgtagtcgacgagcacctgagcggaatgctcgatagacatgagggtcgaagcctgggtcatctcaccgccctcgacgttgtcgagctgatcgaccgtttgacggatagcccgctgatttttctgcatcgcagcgtgacgggtccgggccactccccggatcgccacgtcgaccggcacgccagtgtcgtcgatacggcccaaaaactcgtaggcaggccacgtcatcgtgcggggcaccttacccagcacgatatgggactggtagacggtctcgccggtgtcggcaccgattttgaggacgcgacgattccacgcctgagccgtccgggacatgtgggagactcgcttgtcatcctcgctggccagcaggtcggaggtcgcggcctcatcgatgaccaactcccccagcgcggcacgtccaacctcatccatgagggcgattccctcgccaggggcatcatcacgcaaccgggtcgggtggcctgacaggtgctgccgaagccagatctgttcatcaacggtgaccgggcggggttggaacgctgccggcagtttcgcaccgaattccttagcctgacggagggcccactcccgtgcgacacggccaggagcggtggtcatgagtccggcggcttcggtgattttgttgagggcggcggtccaggcggtgtgggtgcgtattttctggtcttggttgagtttgatcgataggaaccacacgcgccggcctagggattcggtttcaggctggtcgagggtggcgtcgatttcgtcggcccacacggggtgttcgctcaggtcaaggccggcggccatggcgtcgacgatttctgtggggtcggtccaggtgagggctccgttgaggcagaactcgtggcgggcgaggtggcggaataggtcgcggtgagctgcggcgacggtgagggaggcgttctcggtgacgggtcgctggaggggagtgagtcgccaggtggcccagatgtcgccggtggaggtccagacgaggttgtcgaagaggaaccgttcggggatggacatcatgactccttttcggcggcggcgaggaaggcttccaggccgctgcggcgtacagcgttcccggtagggtgcaggggttttctgggggtgggttcagatttcgaatgtgggaggggtttgtggatggtatcggtgtcctcggcgagggcttggtcgagcaggcaggtggccggggtgtcggtagtctcgtccagctcgtcgatcatctcgtcgaggaggttgggggtggtggatgcggcccacacaggtgggatagccggtgcgggtcgaggcggtgtggggaggcggagtttggtttggccccagaggggtgtgtgggtcatgccggcgggagtggtggcggcgtgagtggtcacacgccaccagcccgccagccatgccagaggtgaccaggtccagtcgatgcgaccaacaacgaactgggcgagccatccggcagccagcgcgaaaatgaaaccgcggatggtcatgcccccgtcgataattttgaagcccatcatcgcggcaggaactacgccgccgacagcgagcacctgatagatcgtgtagggcccgccaggaatccttcgacctgaggaatccttaccgataatgcggggctgctggcgggcctcggtgtgccactgaatatccacgatcagctcttgcccaatccttgcatcatctgtccgaagaattggatcgcgttaccttcgataagccagtgcgccataccacacacaaacagcatggagacgatcttggccaggctcataccgtgtttgaagatgttgaacgcggcaatgcccacgactacgaccatggcgacggctcgcaccgcggactgaccttcacctgccttgatcgtcgtccattcgaagaggttctgcgattccagtggcagcaggaggaattgatcgagcatgagaggttttcctttcaggaagccgaccgggatggtcccggtactgacgggctggacggcacgggtgtgccggccaggggcagaaggcgtgacggctggtcgagggaggcaacctcccagcggcctgcacggctgacaagagtcaggccgtactggctggtccgggtagtggattcgtcgccggtgggctggcatgtcacggtcaccgtgacggtaatcttctgccggtctgagggggtggggacctcgtcaggtcccaccacatgagtggttttcactgatacgcatggggctgggtcaaccgcggtgaaagcggtccctgggctgctccatctcgacaggtcggtattcccggtcagcatggcggttaggaagcctgaagaggcttgggcggccgggtcggcggtgcgaagctccgaggtgtctagggtgggggctgaggccggtgcaggcatggggatctgtccaggtagacgcaaggcgatggccttgccgttggaatcgacgtggaccgggactgaccaggcctgtccgctcccggattggccgcccatggtgaccacggtgacctgccacaggctcggatcagacggggagacggtagcgtcataggcggtgacggtggtgggcgctggaccaggtttgcggggcatgcgcgcatcggtgatcttggccgccaccaggtgttccagattgtccaagtgcccggagtcagaggtcagcagaagagtagtcacctcgaccgcggtggctgaggcgatctgagctgtgcggcggtcgtgatgggtggtgtcagtgctgacagctgtggtgggagcggatgccggggccgccgaacggaccagggcaacggggccgcatgcgactccgcacagcacgagggcaaggaagcctttggtggccatcgatccggtgtggggccagggacccacgttttcctgtgcctgttttttcttggccgaccaacggcgggacttagggttagcggatgcaccttctggggtgcatgctcgtctcaatcgcatcggtcacctccttcactggatgaagggaccaaggaggtgaccgatgtgcggtcgaacccgaaaaagttcaaacttttttctgggtctgcctcaagtacgacagaaggcctgcatcatcacggcgttgtggtagcagatcttgcgtcagcgcaaatgtatgggcctcgtaggagtagctcttaggtgggtcccggtggttgcggccagggcgagggtgtcgggtatgtgtagcgctagtcccgggttcgtggtgtgagggcttttgggtgctgacatgcactacccattgctagacgctgtgctgtggcatggctggacgtctagcagacgggttgacatcacctttaggctggcagcgcccgaggccgcaggccagaggaagcggacagcctaacgattgacgtccccctctcctttccccaacctcctggagtcgatgacccggagatagatcgatgtctatgcatctgtgcatcgatatacctatgtatctgtctgtggtttttagaggccactcccgtcgccccgggccgctcagcgataccgcaaggctgtgtgggatcagctgtgccgctctcccgacatggcagacagcaccctgcggactgactgacactgtggcgccgcggaggtctcccgcggcgtccgctggggcgagtgcatgcctgtcagctcatcttttatcgtcatgtttccccttgtcagagcggtctttgcaaagtgacaacgtcaggggtcttgacgacaacatcctcgacaacatcgtggcggtggtctgtgtctcgtcagttcaacgcaccggggaaagaggcaccgctgatgttcaccaccacaaacaccctcaacgatgagtgggaccagattcgcgccactgagatcgattggcatgactgccctgaactgatgcactgcatcgacgttgatgatgtgttggccgtcattcctgccgcccccgacgccatcttgggctacctcattgcccgggctcagggcggtgacgagttggccacccgcactatcatccaagcgttcacaggcaagcttatcttgatggccacggccaccaaggtgcgccgtactaatgacggcttcaatgatctgttggcgggtctgtgggagacgatcatcacgtacccgttggatcgtcgccctgacaagatcgctgcgaacctcatcctcgacacgttgcaccgggttacccggttctggcgtgctgattcccccgatgaggaagaggctcacggtctggtgcccttccctgacactctcatcgccccagagcccgatgaggacgtcacagctagccaggccatcgccttggcggtggaccgcaactggattaccgaggacctagcccgcctcatgagccatatttactgtgacggtatgactggagctgatgcgggtcgtctgcatggctgcgctccagctacggtgcgatctcgatgccgtgatggtcgggccgtgttgcagcgcaacgccgagacgatcctggccgtctgctgatccctctcttgctcatgcctgccgccaccctacccctacctgctagaaacatagccatgtctccagcaacgcatctagcgtatcttctagcaattgatctagctatgtatatagctgatgatctagctaccatatagctgtgtctccagcccaaaggacagcccaatggcatgcttgccacaggaaggtgcgtcagcctcccgaaatactggaaggagctttaccgtgcaggacatgacctcgaccagaccgattgaccgatccccgttcgaccgcactattgcggtgtggaaccacaaaggcggcacgttcaagacgtccgtcgtggcgaacctgggatacctgttcgccgccggtggcaacaaggtgctgctggtcgacatggacccccaggccaatctcgacattgacttcggtatacccgcgggagaacgtgaacggggcatgggattagccgaggcgctacgtgaggggacggcccttcccccaccgcagcatctcagcgaaaaccttcacctggtcagtggcggcgctgctctcaacgagttcaccgaccccgcatccttagcggccatcctcgaccgagtcaccaccgcacgctacgacctgctagctcaggcccttgccccgctggcctgggactatgacctcatcttcatcgactccgggccggcacaaactctgctgtcccagaccatccttggagtagcccgctggctggtagtgcccacccgcaccgataacgcctcaatcactggcctcgtcgacgttcaagacgccatcgacggggttgcctcctgcaaccctgaccttcaactactcggcgttgtcctagccggcgtgggggcccgggccacccggatcgccgcagataaacgccacgccatcgacacagtgctgggggcaggaaccgttttcgatgcggtcatccactactccgagaaggtgtccgtgctcgcacgccagcagggcaagaccgtcgccgagctagccaacgagtaccacaacacccagcccgcctacacctacctagctaaaggccagaacatccccaacgtcgccaaggcagccgtcagcatcgaaactgattatctgaggctggccaccgagatcagcgaccgcatgttcaccagcgacgagcaggagcctgatcatgactgacgatccgactccatccgagcagaacaaccccaccagcgacgacatgcgcttggccgaagaatgggccaacagcggccgcacagtgggagccctgccgcgccgtcaacggcctcagcgacccacaccccgcaccaccagccaaccccctgtctcgtcccctgacacaccggctccgaaaaaaccccagaagacccccaccagccagcctggccgtcaacggatcaacgtcaccgtctacgttgtgcccgaactccatgagcggctgcgctcccgatcggcggcgacgggggtgacggtctcggatctggtggtgcatgcgttagcgttcgtcgccgatcatgcgggggaggcgatcgccgatgatctgcgcgtcgagacgggccccggcatgggggccggactgttcgatgtgaccccatcgcggccagtaggggtcgccaaaacccagctgggggtgcgaatgacccgccacaacaaggatggtttggaccagctgacccggacgagtggagcccgtgaccgcagccatcttgtgtctgtcgccgtgcgcgactatctcgactccaaccctgtaaagaaaggccgacatgtccgctgatgaaactcctgccgcccggggtgggcgacgctttgatacgaccgtcaagcccaggcgccgtcccatgcttatcgccgccggtatcgccatcgtgatagtcggcgcgctcctcatcactcagttgattcgctccgcccaaaccgagcatcgcgtgctggaagtccacgccgatgtggctcgcggcgaggtcatccgtgacaccgatctggtatcggtgactgtcggccaggtcgacaacgtatcaacggttcccgcagaccagctcgactcactggtcggcaaacgcgccacggcagatcttcgagccggatcactcttgcctgctggggctatcggcccggccgatgtcgttccagctccgggcaagtcgctggtcgggctgaagctagccgccggacagatccctatcggagaccttgctgtcgggacgaagctgcgcctgatccagacgtcggcacccagcggctcatccaccaccactgatagcagcaccaataccgatggccagtcgtgggaggcaacaatggcgaccggcaccaaaaagaccgagcaggtcaccttgatcaacgccgaagtgaactcgcgtgatgccgcccggatcgcccaactgacgtcacagggccgtatcgccgtagtgaaggatccgatccgatgagcaccattgttttgaccagcgtctcgggagccccaggggtcaccacgacagcgatcgggctgggcagggtctggccacaatcgagcctggtcgtcgaggatgacacccaccacgccatgctggcgggctacctgcgagcctcccagcacgccgaaccgaacctggccgcagtggcgaacctgacgtcgactccaaccaacgcccaaacggtgtgggaatctatcgccagacccctacccaccgatgacccagtcggcgggctgcgacgcaaaggcatcctcggcccgcccacgccgtggtctcgcgcaggcatcgacccccgatggggattcatgctggccctgtggcggcaactggaggaggctggcatcgacaccatcatcgatttgggtcgcctagccacaccactgacctcaacgccacacctgatcgccgcacccatcgtcgaggacgccgacatgatcttggtgatgatcgaggcgacactacgcgacatcgccggcgcccgcacgatggtggagggactcgctgagcagatgaacttggccggcgcctaccgacgtctcggactgcttgtccaccgtggcggccaggcccgcggcgtcgccgagttcaatgacaaggagatcacctcggcgttacgactcccggtcatcggggccattacccacgacccggccggagccgcccaactctccgacggggtcgggcagcggttcgacaagtcacgtctggcccactcactatcaaaggtggcggccagcctcgtcgatgccataaacaagcgccacgctgatgacgaggaggatctgtgatggccagttttgctgataatccgttcgacaagctgcgctcccaggatgcggcaagagcttcggtagagcaggagcctgatgccggattagcgtcggagttgttttcgacgtcgtcggggtgggccagctctcagcaggtgtcccaagctcaaccggtgatgacccgttcggagaacgtggattggccggttgtcgcggagctagccagtacggccactgatgaggttgaggctgagatcagcaggtggagttccactcatgatggggtggcgacgctagacattcgccaggccatcgcggagcctgctattgcctcggcggtgtctacgtatgctgaccgacgccagatcgatgtaggggagacctggcctgatctggtacgccagcgataccgcaaggctgtgtgggatcagctgttcgggatggggcggttgcagccgctgttcgaaatcagcgacgccgaaaacatcatcgtggtgggtaaccatgaggtggttgtcgaccacaacgatggttcccggtcaacgctgccgccggtggccgactcggatgccgagctggaatcccagatcgcccggatggcgaggaatgcgaccccgcggcgagccttcgacgccgatcacaccgatgtgacgatcatgcaccaacagaagttccgtatccacgcgatctcttcggaggtgtcgttgcaaccgtcggtggtcatccgccaacatttgctcacccaaatcagtctgggggacctgtcccagcggggaatgatgccggtggaagtggcccggttcctcgatgaggcggtacaagctggcaagtccatcgtggtcgccggcgagcagggggcaggcaagacgacgtttttacgagcgttgatccacgccattccgatgcgggagcggttcgccacgttggagaccgatcaggagttgttcgctcatctgatgcctggccgggaaaacacgctggtgctgttcgcccgtgatggtaacggcgaggtggatccggcgactggcacccagcacggcgctatcgagatcgcccagctgattcctcctagcctgcgccaggcgttaactagggtcattgtcggtgaggtgcgcggcaatgaggcttcggccatgttccaggctatgcagtcggggactggcactatgagcagtatccactccccgcgagcctctgaggtgccgtcccggctagcccaaatgatttcgatgggcccggtctacgatctggatcaggccatgctgcagatcggtcattcgatcgactacatcgtctttgttcgtaagcgtgacctgcctgatgggagccggctgcgatttgttgagcagatccgttcagtctcgcctggtgattcgacaactcccagtcttggcgaggtgtacacggctgactcgtggacaggccagccgcttacgccactcatgcctggttcggccgccgacgagctgtctcacttcgcccgagacctggattactgcgaggcccactgatgaacaccccagcgctgatagcagccctcatcgtgaccggcctgggactgatcatggccatcaacggcctgatcccggccacacccaaacccggcaccacgctgacgctgtcacagcggtgggcccgggccacccaccgcccagccggggcagccgggcgccgacgcgacctgcgctgggcgctggccggtctcgtcggcatcgtgctgttcgtcctcacaggttgggtcgctgccctggccctgggccccatcaccgtgctgctagcacccaccctgctgggggcggccccaccgaccgatattccgctgatggaggcgttggatcggtgggtgcgtcaggtcgctgcggtgctgccacaggggcgagacatcatcacagcggtgcggatctcacggccgcgggccccgaagctgatcgccgggtcggtggatcaactggtgtcccggttggatggccgtatggagccgagggaggcgttccagcggatggccgacgagctggactcggctgaggctgacgcggtgctggcctcactagcgttggcggccactcatccgcggggagcctcgacaacgttgaaggctattgctggcaacatccaacagcggttgaaagtgctgcggcaggtggaggctgagcggtctaagccgcgtaactcggtgcgccagatcacactggtcacgatcgccatgttcggggggctgctcgtgatcggacggtcgtttctggccccgctggcgacccctcccggtcaggtgctggtggccgtggcggtggtcatgtatgtcatcgcactagtgcagatgtatcggatggcgcggccccgtcgacgcacccggatcatggtcaggaggacccgatgaccattactgctttgtccctgctggccggggccatcgtcactgtcggactgctggtcatcgtggcagcgttccgcccagccccaggccctgacctggttgccgctctggaggtggtgtcgggtcgcacctcaagcgtcgccgagaacgtcgaccagacccggatcgggcggataggtcgcagcgtgacccgcacattccatgtgtcggtgtccccggccatgcgggccgcactgcgactccaaggcacgacccccgaagcgttctacggtcgacgcctgatctgcgcactgatcggggcgatcctgccgtggctgctcaacgcggtagccatcgcggtaggggcgaattccccgaacctactcatcccttcggcgctgtgtgtggcgttagctggcgctggatggatgctgccggcagcacggttgaaggctgcggccgggcccaccaacgatgactcgttcgaagcgctgctggtattcatcgatttggtcgtgctggaacggctcgccaacgaaacctccgtcgacgcgctcaccaatgcggcaaacatgtcggactcgccgctattcgtccagatccgtcaagtcctcaaccgtgcctccctggaaaacgtcgacccgtggaacgggctagaccggctagccgaggacatcaaactgcccgaactcaccgatgtggtctccatcgcccgcctccaaaacgaaggcgcctccctcgtcgacagtttccgggcccgagtcgccgagttgcgcgacgcctacctgctgcgcctgcaacaagaatccaccgccatcacccagcggcttggtttgtggacgatcctgcaagccggctcggtcatgctcatcttgctgggggcggccgccctcacactcatcacagccggataaaccgacatcgtgtcgagcccccatatgggccgcgaacctttcataatgatgcctgtaagcaccacaatattgatcacaacctaacaatgaaggagaaatcatgatgaccgatctcgacctggctaaaaaacagatcacctggctggcggcgcacctgcgttcccggatcgttgacgagcgtggcggtggtagctctaccgtggagacactgatttggattggtgtcatcgtggcgctggtgattggtgtgggcgtcggggtgacggcctatatcaggtcgaagatgcctcactgacgacgatgcgtagcaggttcacaactgatcagcgtggcggtggtagcgcgtcggtggggatgctcctgctgatgcctgcgatcatgctgctggcattcggtgggatcgaggtcgggatgtggtgtcacgcccatcagtcgaccatcgcggcagcccaaagcgccgcggaggctcagcgtgtcgtccatccggtcccggggtcggcacaggaggcagcctcgcagatcactagtcatggcggggtgcgtgatacccggatatcggtcagtgatgacggggccactgtcacggtgaccgtctcaggtcgggccccatcgatgctggggctgcatcttccggctgtgtcgtcgacagcgtcgatgcccaaggagcgcctgtcgtgaggcgaagtgagcgcggtggagcaagtctaagcgtcgaggtgctcatgtgggcgccgatcgcgctggtgatcatcgggtttgttgtgggtatcggccggatgtcgatggcccaggacgcggtgaatggcgcggcgggtgctgcggcccgtgcggcgtcgttggagcgtgatggacagtcggctcagtctgcggcgcagcaggcggcgtcggcgaacctgtcgtccggtgggctggcatgtgcgccgaatgtgagcgtggacacgtcagtgtttgcccgtcctgccgggcaggcgggcacggttcacgccacggtcacgtgtgtcacctcgctgggtcttgggttcgggtcccggacggtgcacgcaacggggtctgccccggtagacacctatcgggaaaggagaggctgagatggcccgtgatgagcgtggtggcggctcggtgtcggtgtggatgctgctcatggtgccggtgattctggtcatggccggcctggtttttgacgggtcccgtcagatatcggcaacccaggcggcccaggacgcggcggttgcggcatcccgcgccggaactgatgcggcagcgacaccgcagcttgctggccacgacggggcggccgtagcagtccaagcggcccgccaggcactatctgctgccggggtggacgggtcggtgcaggaggacgggtcgaccatcacggtgaccacgtctcaaagtcggccgacagtgttcctgtcagcgatcggaatcagccaggtaagggggcatgggcaggcccatgctcagcttgtgggaccgggagaacgcccatgacagtgatacgtcgtatcggtgccctggtggcactgctggtggtgatagccggcttaccggccgggctcgtggccgcaggcgccccgctagtaccggcgggcctgtcatgggcccatgtgcggcatctgttggttaccccagacatgaccgggtcggtgctggtgtggctggtcagcctcatcggctggatcgggtgggcatggttcgccctggccgtcgcagccgaagcggtgacgatgctctcagggcagcggctgcactggcacatgcccggccctcgcctagtgcgccgagtggcagccggtcttctcattgccgcgttcgcggccgcaccggcagccacaagcacggctcacgccgccgaggccacccatgtggcggtcgccgcccaggctggaccggcacacgcggcccccgcccaggacagccccgccaccacctctcaggccccggacgcctccaccactccgaaaatctggaagacctacacggtgcgggccaacgactacctgtggaagatcgccgagcactactacggtgacggcgcccaattccgtcgtatcgccgaagcctccggtatcgacccgcactcagagctgaaagtcggccagaaactgatcctgccggttcctaagaacacggccgcagttcattcggttaaagcgggggagtatctgtgggagatcgccgagcactactacggtgacggcgcccagtaccataaaatcgctgaagcttccggtatcgatgcccattccgatctagccgtgggccaaaaactcgtcatccccgggcccctccgccacgacgccacgccgccacaccactcggcgtcgacccacgcgaaggccgccaccccagcccacacgcccacgcgacggcctgcgcctgcccacaaagccacgcccgccccgacgccggccaccccaactactccgacccacacggtgaccccagctccggcctctgccggccactcgaccagcgacgagcacccactccatacggataccgccgcagcggacaaggccagcaacgaggacgccctgtccccaatccaggtgggtttgaccgccagcgtcggactggtgctggtcgccggactgatcaccaccctcaaccgccgctaccggacccggttcacccgccagccccgcggcaaggccatgaccctgcccagcccggacgcccaaactgccgagatagcgctgcgcagcaccggggcgactgacactctgacgatcacctgcctcgaccaggcgctccgcgcgatcggcgcatggtgccaccactgcgggcacccgctgccacccctgctggccgcccgcgtcgatgacgaccggatcgacctgctgctatcccaggcggcccccgaccatcccgaggcggtggagctggccgccgacggatcggtgtggaccctcaccgccgaccggatcgacgacctgctagcccacaccgatgacaaccaagcggctccgtggccgtctctggtcacactgggacgcgacgacgacggcgcccacatcctcatcgacttggaagccgcaggaaccttgcacctgatcgccgatgacgaccaggtcgacgcggccctcgccgcgatcgccgtggaactggccacctgcgactggtccgacgaagtcaacgtcaccctcgtcggccaggtgtgcccgggcctagaagacgcactagagtctccgaccctgacccgcgccaccgacgtggacaccctcctcaccaccctagaagctcgcgccgacgaccagcgacacatcctcaccgaaggaaaccccctcgccgctcaccgagccgaccccgccatctccgacgggttcgacgccgaagtgatcctcctcgacaccgaactcaccgaagaccaccgcaaccgcctcgccagcctcgtcgaggctcttccccgcgtgtcagtcgccgcggtaacaaccagccccaccagctcagacgaatggtccctcaccctgacaggtgacccactagccgccgacctggctcccctcggctggcacatccacccccaaaccctctcccccgacctgtacaaccgcatggttgaactactcgccaactccgccgccgcagactacgaacccgccagctggtggaaccacgacgccgacgacgagcccaccaccgaccccaccaacgaggaagaatctaccccgagcaggcgagcccgcccgaatatccgcctgaccaccctgaccggcggcatcgacctatccagcgtcgacatcgacgacatcatcgacgaagccaaccaggccctcgacaacaccgaccagaccaccaaccaggttcgcgtcgacaccaaccaacccggcaccgacacccccttccccatcgacgacatcgacccgctgagctccgaccatccggtcctatccatcatcggccaccccgacatcacaggtgccactggaaccgttgggcgctccccgtggcgctgccaacagttggctctctacatcgctgagcatccgggagcatcgggggcgactatcgccgatgatttggggctatcagcgtcgacggtgcgctcgattgctacacacctgcgacactggttgggagccgacgatgccggggtggcttacatgccggcggcgacgcgcggctaccggctcgatgagcggatcgtcacagatgtggacctgatcgacgctgctgtggccggggcaggcattaacaccgctgagacggccacactggtggccattttgaagctgggccgcggacgggtcttcgctggggttcctgactcggaacttcgccagttcagggcgtcgatgtaccacgtggaggcccgcatcgtcgatgctgccctccaagtgacagaccgggccctggaagccggggacctggggctggcccggtgggcgttgacccaagggctactggtgtctcccgatcatgaggacctggtcaccggttgtctgcgcaccgagtaccaggccggcaacatggacaaggtttccgagctggtcgatcacctgtcggctaccgcacgacgcctgggcgtcgatttgagcgccgacaccacccggatcatcgactccgttattacccatacacgcaggagagcatcatgatctcccgttgcactcatctccgtcaggaaggttcctatgcaccattatcgtcttggtatcggcactgccctcatcgcggtagcagccgtggccggctgtcgctcaacagactcgacacccacaccacctccatcccgtgtctccgccacgacatcagcgagctctaccctcagcccgaccccgtcagccggagcgatcagtgccgccgacgccgaaaacatctaccgcaccgtccaagctaacaagatcgcactgtacaaaaagggtggcctggcacccggggaacccgcacccgcgacactgtcgaactacgccaccggccaggctctcaccgactacatgacctacatgcaccaaatctcggggcagggcatcaaaatcacatcggggaactcctcggttaccgcggtgcgggagaaaaagggtgataccacctaccccgaagccgctatcgccttggaatcgtgcgaagacgacagttcgattcgtaccgtggaccgccacggaaaggctgatcatggacgcattttccatgtcgacagttggtatgcccgcgataagaagggcaccgtcaagatgatcgcattcaactcaacggaggtccccacatgcgacgtcaagtaatcaccgcggccgtactgggcctggccctggccaccacctccctgcccgccctcgcaggcggcggcgacttgaacggcagtgtggacacggatggccctggttacgatgtgcgtactgaggtggattaccatcacaccaccggtggtgcgggtgggggtgccacgacagggggccatcatgggggcaaaacccacggtgatggtgaaggtgaggctattgatgggcgttctcgcgccgatgccgaagccgaactagacgaagccgaccgtaaccaggacttgacttgtgatgtcttgctcccaccggcgccgaataccccagccggccaggaatgggcgaaagaatgcaatcccccagcgaaaaaggggcagaaggccaccccgaagcccgatccggtgttagtgggccgtcacgcggccttgcagctcacccttcccggcgcggcccctcgtatcgatccgtcccccgaccttaaccggtggcactcggcagcagtgggccaggctttgtggttgtcggttgatgaccccaccgccactacgcagaaatcgatcacgtttatgggccaggttgtctcgttgagcgccaaacgtaacggtttgtcgtttgatatgggtgatggtcatgtcgtgcactgtgatgccacgacgacatggacggagtcggtggaaccggggaccccctcacccacgtgcggttacacctaccaacaggcagccccggccgggggctataaggtcaccgcaatcacgtcgtgggatgtgacctggtcggtactaggacacacgggcacagtccacatccagaaggccggtgggcagatgcttccggtcggcgagttggagtctgttgttacacggcgatgactcctgatagtccgacgctgtatgaggtgttggaggtctgccctgatgccactgatgaccagatcaagacggcgtggcgtcgtgccgcgaaagtgactcaccctgatgccggtggcactagtgaggcgttcgcggccgcccggcacgcctgggaggtgttgtctgatcctgcccggcgcaccgcctacgatgccgacctggcgggggaggatgatcccgacgacgaagccgccgacgccttcgacgttgatccgttcacggcatggccctggtgcgccccgtacatcgacgccacccccaccctgcgccacacctgccccggcacgatcaaggccatcgtggtcgccatcgccgggatcatggccggaatcggctggcaggaagcgctggaggccgtggtgtcgccgccggggtttctgggggcgtgctggatagtctcagtgccggttgtcgtcgcagtgacatggctggcagcggtgacgggtctggcatttttcaccatggcggccatctggtgtggatggtcgttgataggtggtgcgttgctgtggggccagacgtcggtggtgtggctgattgctgcggggtggctggcatggctggtgtgtgcgtgggtgtggtggaaccgtcatctggcgtggagtagcgagctgatgcaggaaggcaatttgtacggccttcccgaggaagacccgttgtggggcgaggccgtggagctggtagcgggacttatcccctctgtgcgggcgatgtggtcgcacgatgggcagaccgtgactgtgtcggctggccggcgggtggcgacactggggatgccgatgcggggatggcgtggtatcgagatgcgcggctggaatccagtgggcgccgatacgtggtggatcgttgaccaggtgggtagttggctggtcgatcaggatgagccgatggtcgttgacgggagggtgctccatgaggcgtgggaacggtcgcagatggtccgttcaggccgctgagaaaaaatttaggtccgccctgcatatcggggcctcttcataccttcaaaagtgtgaagggaatacagactcttcgactggaattaaaatggtatatggcgtgtccggtccgcacccagctccacgatgcgccataggggagccataacttcaccaatcgtatacgatatgagtgtaggtgagcatctaccggtggccgacagtcagatacaagcatgggcggatgaagcagaagctgattatgacctcagcatgcttccgccgtctcgacgtggtcgcccaccggtggggaggggcccgggcactgtggtccctgtgcgcttcgacgcggacactctcaaggcgttgtcacaacgagcccctgacgaaggattgaccacgcgttctgacgcgatccgtgctgcggttaaccagtggctcggcctcggctcgtaaacattatcggcgcgacaaccttactgatgacgctgttggttacgccgtagagcacatcttgtactcgtgggcgctcgacgatgctgatgatcctcgttgctggatgatgattcggtgttgacccagctggcctcctcatggagctagttatcctcatctacgacgatggctatgaactcctgatccacgccatgaaagcccgccctcagtatctgagctacttcgctatctagtgttgttgggcgagttgaactcaacttttctccgacgcaagcgccaataaaaggctgatccatccgaataccaccaaacacggctgacgtgtggaacagattcagcaagacagggtgcggtgctcgggtgcgttggggagatgaggatattcaggcttctggcgggatgtggcttgatgacgtccaggatcaccggttcggttttgaaggtgccttgcattaatgtcgacagggtcgtacgactcgaggactggatcgaccagcccgttgcgtctgaagaacttcatccaccccggtggagctccggccgcgtactggtgcaacggatcattagcatgggtagcgtgagtatgccttcgatcgtggtcagtgctgtcatcatccaaggttctgacgggcggcttctcactgtccgtaaacgaggcaccgaggcattcatgctgccaggcggcaagccggagcccggcgaggactcgcgtcaggcagtagtccgggaagtgcacgaagagctcggcgtcgcattgtcttccgacgacctgcgtcgggtgggagtgttcaccacgcgagcagcgaatgaggccggccatcaggtggtggcgacgattttcacccacaccccggttgcggtgagtgagccagctgctgagatcgagcagattcgttggctcgattggagtgtcgacgccctgcctgatgacctggccccgctgctggtcgaggcagtcatcccgtggctgcggcgccgtatccggtcggtcgctgtattcacgggtgcgaaggatggaaccgaccctcattatcgtgtcgaagcaaccgccttgggccggggtctcgcacacgccgggatcaccctggtttatggcggcgggaaggtcgggatgatgggtgctgttgctgatgcggccctcgctgctggcggcgctgtgatcggagtgatgccgcagcacttggtggacggggagatcgcccatcctagtctgactcacctcgaggtagtgcggactatgcatgagcgcaagcagcggatgagtgacctagctgacgcgttcgtcgcgctacccggcggcggcggaacccttgacgagctattcgaagcatggacatggcagcagctcggtgtacacagcaaacccgtggccttgtacgactcgaccttctgggcaccgctgaccgcgctactcaaccacatgaccatcgaaggcttcatccgccctgaggaccgcgcctcgctcgtgatcgccgataccatacatcagctgatggccgatcttgagggatggaccccaccaccaccgaagtggcgctcgtgacatagaacaaatgattctgactatggctcattgacatctgcgcagcggctactagctccattgacttcaaatcgggccttggccgaggctcggttcaggtggcccggaatggatccccacaaattgaatgctcatgatcgaggtgatgaacgcccactctattgtcctacgcccggttgtatccagcgagcaattgaaggtgctgcgcctgttggtcgaccaggccgagccactcatcatcgacgggcgcatcttgtacgaggcatgggacaggctgcaaacagcccgtccggcccgctagaaaaaatttttagggcccgctccgcacatcccggtctgtacccacaccttcaagggtgtgaagggaataaaaacacacctaacaacaactttgtttcatgatttggcgcgtcggaccctttctgaccgatgtcgtgcgcaacaatggacccatgagttcgcctaccaagatgcgccggaaggggacacgcggcccgaaacctcgcagcgacgaggagctaacggctgtgatgttccgcgtcccagagtcagtggccgaacgtgtcagcgatatggcttgggagctgaggctctcccgatccgatcttgtgggctggtcggccctctatgcactcaactcgatgctcagacagcgcggagaggacacgattccggttccggagtatctggacaaggccgtgctcgctgcgttgtatcccgatgggttgcccttcgacgaggacaccgaggagccgggcgagaatgccgggcaggaggagcttgcgatgactggatgagcccgaacatggttgaaggccgccccgccaggcgaccttcaatcaatggtttcggttgtcagctgcagccacccttgccaggtgctgtggttcttctccagaggaggagggaccgccatgaagacccagaagacctagaagatccaaaagaaccggtttcggctgttgcttcggtcttcatggtagctgatagcccgcgtcgttggaagtgcgacgacgccgatcctcatcggtatcgcaccctgttccagggtcgagaatgtgaaggattaacaaccatgacaagtcatgagacgccctcccggagggcgtcatgaccgctttaattcaagctctgccgacagctgaactgtctgctggacctggtgctagcagtccagctagaccctctgctgagggcttcatcaagattcaccacgacctcattagtgcgggcgtgtcgggtaacgcgatggcgttgttcgtcgcgttacgtaaccagcccggctgtgatcagtggacccgtcactcgtacctgcggctagcccaatggtgcggctgggatgggctgtcggaggcggcgggctgtaagcgggtgcagcgggccgctgctgagctcgctagcggtggttggctggaatcgcgggtcggccatgatcgtcgcaccgctaagacgctggtgtggcatcggttgaccagccccgacaccgaccgctgggagcaattgccgcggattgtgtgggcgaggatctgccagatcgccggggagacgtcgggagagtgggtgaggcattggctggtgtggcggatgctggccggtcgtactggtgtggctcaggcccctacgtccatcgtggcccggttcctgggctgttcttcgcgccaggtctctcatatccgtggggctctcgttgatgccggtctgctcggctgtgacgaggtctcgggggcggcgagccgggtgtggttcccctcgatggccgaggagtgtgcagcggatcgtgaggtggtcgatggggccgtcgtcgatgctgaggtgggctctggtgaaggtgtcgaggagggcggggaacccctgtcgattttgtccacccacccctgtcgattttgtccacccacccctgtcgattttgtccgccaagtattagacaaaccattagacagtgaattagaccctgggtcgcgtcagcgtgtgaactcaccaacgcgcgcgcgcgcggcggccgagccgccgaagccaaagaaacccataccaccaacgcctgaaccagcagcccccgcttcagacagtcctgtgtcagcgcacgctgatgaggctgccgagttggcgtggcagttcgtggggtggtgtcctcagctggtaggggcaccgaagaaggtgcgtggccagctccgccagatggtcgctgccgagatccgccggaatccgggctggctggatgcgccagcgttggaggttgttgcccagcgggtacgtgctgaaggtgcgctgggggtccagcactgtgagattgtgcgagccgagctgcacggggtgatcgccgaccagaaggccgcccccgcccgccccgacgccctgcacgcgcgggagcccaagtggtgggacgacgtgtactacgaaggaaacacaaccgtgtggtacgactctgacgaaaccagtgacgacgacgaggcgtggaaccggtcgcaggtatgtcatgttgctgagcgtgacgacatggctggcgggattgctaccaacctgctggcctcccacgctgatgatccgatggcctggctgactcgccgtcaaaccatgctgatggctcgtttcccccacgcccagaacgaggtcatcgcgatgtgccacatcgtgcgcaccgccctggaggccgacatggccgccggaacccggtgggaggactgatgagggtctcccggcgcgccctcatggccgtggcccgtgccgacgctgccgcagcagaccatgccaccggccgatgggtggccacagccaacgccaccgtcgcccggctgaccggactgtgcgaacgcaccgtccaatacgcccgcgccaccctggtccacctgggcctgtgccgcgtcgtggccaccggccgctacctcaccgccgacgagcggcgcacggctgctcgcacccatggcggccgccagatgcgcgccgcctccacccgcgtcctcaccatgtcctgcgcaatcgtttgcgccctaccccgaaggggtcaccactacaggaaagttaagttcctagatggtcaccaacgcacgcgcaggcgcgtgcgaaggccagcaacaccagagaagaaacccctgtggctgcaaaaactcgcagccctcctcgaccagcacctgccctggctggtgagaaaccatcacatcggccgactgtgccacgccctcaccgccctgggcatcgacgaacactggcaacccgcagacctcgacgccctcctcgacgccatgaaccgcaggaaccgtcgcctcggcctcgacgtgccatgcgccgacgaccagcacaaccccttgggactgttcatccatcaggcccgagacaccctcacccacgacaacccccatgaacgccgcctagcccgtgacgctgaacgcgcccggctcatcgacgaccaactccgccgccgcgcagaaaccgccacctgcgcagcccgcctcgcagccgagcacgccgaccccgactaccagacccgccgtcgtgaacgcagggaaaccctgcgagccacactcagggccgcccagcagcatgtcaggacacactgatacccgctcatacgcacaccatgaaacacgacaagccacctgacagtatcagctgcaagacgcatgacaacatagaaggacatgatgaaatacacatagacacaaccccgcacagcagtttcgcaacaaatcatgatagtctcatggcagtatcgcttgatacacacatagcatcactcccacataggcagttatgctgatatactcctactaggttatccgtccaacatgctgagtgggttcctgtacagcatgaaaggagcatggcatgatatgggccgttctcaactgcaagggtggtgtcggcaagacgaccagtgccctcctgctggcggcagccgccgccaagcagggccacaccaccctggtggccgacgctgacccccagggcaccgcatcccagtggtcagccctggcaaccaaaaacgacgaacccctgcccttcccggtgcaagcggtcaacatcgccaccatggaggcactgcccaccaccaccgacgcccatgatctcatcctcgttgacacacccccctcggcaggcgatctgatgttccaggcatgccgcatcgccgacctcatcatcatccccaccgccacctccggacccgacatctcccgaacatgggtcaccatggacgccacacaaggcacaccacgcgcgatcctcctcacccaaaccgaacacaaccgtgtcgtctaccgccaagctcgcactgccctcgccgccgacgacaccgtcgttctcctggaccacgacatcccccgccgtgaatccatccgcacagcatggggcaccaaccccccagacgacgtcatcacctactacctgcccgtcctcaacgaactcatggaggccctgtcatgaccaccaagaaaaccgacccattcgcccgccagaaagcagcagaagaccgcgcccaccaactccaagacgaagcccaacgccacgcccaccccaaacgcgtcatcggccccaccgcacgattccagttcgtcctgccagccgacgtgctcaccggcctcaaacacctcgccctcacccgcggcaccaccgcccgccaactcaccctcgacgccctcgacaccgcctacggcctcgacaccctcgccaacagcgggaagaaaacccacccatgacccgtgggtccccctgccaccaccccctcgacggcaactgtgtgcgagccacaggcccgcacacaggcggcagcccagtgccgtccccgccaggaaaggaactgaacttttctggagtgctggctccctatcaccccttatggtgctatcagatccagtagcgccagcccgagaggaaacccatgagctacatcgtccgcaccggaaatctagccggcacccccgagctgcgcgaggggtagccgacacggcggaccgtgcccctgacagtaagcggcactactggagacatcaccatgaccgctcagatcctcgccccgtgcaaccagaaggctgccgtcatcgaaggagccctgccatgaaccaacctaccccccacaaggccgacgagtcacagacgagcaacaccacgaggaagtggcggcacaaggtgtcgttctaccaagacccggccgacaccgaccgagtccgcggagcgatcctccacaccatgacaaccgaaggcaaccggaacctgagccagttcgtcaacgatgccgtcatggccaaggtgaccgaactggaagcaaaatacaaccacggcgagccattccccgccgtgggagcccgaggactcccccagggcggcgcagccgccaacagataagagggcggggaccaccaatagcagtcgatttcggatccagatcgggtagacaggacccatgatgaatttcatatcctccctgctctcggccatcctgaccctctttgcgatggtagccgtggcgataggagtggtgaacattgtgccgggaatatgcgccatcatcggtgcacggaaatacggcgaccaggaccgtgtgcgggcaggacaacgaaagatccttcttggtgctatcgccttggtggtagcagtaggcattcacccgtgacccacggttaccggaagccccgccgcaatcgataccactgtcagtaccatcaggggcgataggggtcaagctctccttgtcacaatcccttccccggcagcccagtaaccgtcgcttacagccatacatggatatgcgcccattcgtcggcaccgacgccgtgcgggttggcgacgctgacccgtctgctcacaaacgacccttccagcccagcaccacccactacaccgacacgatccacgaagctgaaaccgaacctcccatccccgtccgaaacatcaacgaactcatcaaccccaccaaccatgcatgaacgcacgatcgcctaccggccagccttcctgcgcgacgtgaagcggctcaaaaacaagcactacaacatgaacacacactcaaatgggcggtaaggtcacgaagtcgacgtggctgcctcacggatggcttcggcgagctcttggggtcgactccacatgggccagtggccggttggcagatccatcgcggtgaagttggtcaggtgcgcgacggcgctgaacatcggattgcctgctgcggccagctcgaggacctggacgctgggaatggagcagcagatcaacgtggttagtacatcatggcgagcgctattggacagcgcgacccgtgcccgggccacttgcgcgggttcaggaaccgcccgtgcccggaaccggtcaaggtgctcgttgctgaggccctctaaactggcctgcttgccgagagtatcgaagtcaggaagtggcagctcagctgtttcctcaggtagatctggtgcgaaggcacctccatcgctcatgggaccggagtccacccagacgatccgatggaccaactctgggtgcctgtctacaactaggctcaccggcccgttcgcgccactgtgtcccaccaggaccgcatcgccgcccatctcgtccaggatggctgagatggcgtcagcttggtcgtcgagcgtgcgcgtagtgcgctgggtgtcctccggatcgaggccaggcagcgtcagccccacggctcgactgccagcagtgttcaataactcgactacctcgtcccaagcccaggctccgagccagtaaccaggaacgaggacgataggccgatgctggtcaggtcgcgatgttgaagtcatggagacatagttgcacagtgcgcggacaagggagtggcactatttctggcatgaatttagatctgggtgtccggtgaggcgatcagaacgcctccatgtactgtccgagtgtctacgatgcagcggacacagtcgagcagctggctcacaagtttccaggtgtccttctgcccctatgagggaagtcggctgctctcgcaacctttgagggctgctctggggtcggaaccagttacagatcgttcaagttccgggaactaccgccggtcacgctgattgattcccgggcgatctcgcttctgacgacagtggtcggtaaccgagaggcgtcctactctgaccccgctgctgcggtgagtaaatcacgggcgtcccggatccggccacccgtccaagtgccagccagcttgatcggctaggcatcgtcaaggagcgacgatgaggtgatgatgcgatgtgagcgcaccgcgaagtgaggtataaagaagccttcccgggcgcatgcgtcgcccaggaaggccaggttggcccctggacggctgaatggttgggcggatcaggctgtagcggagacgtgcagtacctcgtaggcgatggcgttggttgggctctggtctgcatcgtggctactgagttcgacgaggatgacggtccaggtggtgatgtcgacggcggtgacgcgggcgatggtggaatcagtggatgctgcaaggaagtcggcggttatgtcttcgatgcagtgggacggagcagtgctggtgggcaggggcacggtcttgacggtcaggcttcgggcagcagagtaatcggcggttccgttaacaagctggtggacggtccagtcctggatcgggtgccggccgaagtcgcgtacgatagccgagtaaccaagttcgccccagcagaactggcgcatcccctctatgtcgcgccagacgtagaagggcgcgtaggagttctggggtgcgcctttgaccttttcttggatgaggtaggccttgaactccagtccatggtagccgtccatgaggtgtccagtctggatgacgcggtcgcggatgatctgcatgtcatagtcggtgggcagggtgatctgatattgcatggcgtacatcagcggttctccttggtttcgtgggagtaggtcgtggggatgacgggttcctgccaatcgatggttgacaagtcgtcggcggcttgttggtaggtaaggtggatcattggctgtttgagtgcagcgccatgccagtgtctctggccggcgtcgatccagatggattcgcccttggtcaggtgctggggtgcttgtccttcaatatggaccagggcaacgccgcccgtgacgtagaggccctgtcccttggggtgtgtgcctcagcggcaaacgtgacggcgtgggcggcacgcccggcgtcttccgtggcacgatcggccggatccatggcggcgcgcagctgctgttctgcagccaggcgtccaggtcacggcgggcagcatcgacacccagggcagcctcgacggcttcagggctacgacgctggccgggctggttgaccgcagaccactggtgccgggcgtcgtccagatcatggccggcggcgtcgatgagggcggtggtggcttcggcgcagcatcgcctgatccactccgaacgtgacaggccagctgtctcggcggcactgtcaatgcgcgccaggagagatttcatgggcgctcatctgtagcctccagataggcgttgatgtagcgcagagcctgatccgtcatgtcgatggcggctgcctcggcagacgacacaacgggctgtggatgataagaccacccaacatagacggcgaacatcaatttctcgacagctttcatgaggtccccggcggcaaccgcatccgcctcatcatccgaggagaaccacttcaggtctgaacggctgtacatagcccctaggtcctgatgtgggtcgaggtccttggaatgatggaagttcctacacacccatcgccaaagacctcaacatggacaacgctaccttcaccactccctcatctgtgaagagccagtttatgcacggtgttgaaagaggcgtcggtctacgacgaatgcgggttaatggtcttgcggtgtggggcgctgggcgatggcatcgagaacgcgtgagtgggtggcgatccattccgcgtcggggttgatgttgcgggcgacggtgtcgatcgctgttacgtagtgggcaagcctgcgaatctcagcttgttggtcagggtgatcgctgatgagaggctcttgatgggaggcgcggttacggacgtggcggatgagctccacgttttcctcgaagtcgcgtcggctacgccccgggtagtgaggcatacctccgttacgtaagtcagtgagagctttccatacggttgcttccaggcgcggggtgagcagaaagcgccagttgtccagtgacagactcgccacgatctggatcaggggtcgcatcgagtcctcgcgcgcccgcagtcgcttctcggccctggcgacgttacgcgggaaaccaccgagccgatagctcggggattcccaccaacgccgtatgccagtatcggcgctcaggcgcacgtcaatgaagtttctcaggagtacctcgacatggctgatgtcttccaagaacgctttcgagatgcgggtgttccacacgtaccacgcatcgactggttcgatccggtagcggctgagcctggcgggtgagaaccactcctgcaacgtctcacgactcaccgtgggagcgtggtaggattgatgacgataggcctcgggaaggtcaatgccgcgaaatatcggtatacccccgaggtcattgttttgcccaggcccctcctcgcatacttgcggggcgtcattggctgccgtcatctcgtctcttcccggtacgtggctgtccatgttcacgggcaggtacggcaatgaggttcccgcacacaaacctctaccaagcatacgctggcaagccccgacgagacgacgcctccgcccgccacaccaacggtcaccgccacggccacggtgaccgtgaccgtggcaccgaaacccaagccaaagcccaaggccaagccaaaggtaaaacccaaaccgaagcccaaggcccattcatgatcgcagtgcccgatacaaggtggagcggcccacaccaagctgggccgccaccttcgttttcgggacaccctcggcaacgaggcggcgagcgcgggcaagctggccctcgctcaatgccggtttccggcctcgatagcggccctgcttcttcgccaccgcgatcccctcggcctgtcgttcatggatcaacgcccgctcgaactcggccaaggcacccagcagatgcaacatgagctggctcaccggatcagcggaccccggcccatagacctgcccttcaagggcaggcccgttatgctgtcagcagatctgccagttgtgggtgctggtgtcgtagcagacgccggtgtcggtgtcgtcggtgcggttggtggcccagccggtggtggagtcgtcgagggtgatgtggtggaggtcgggttgagtgttgagccagtgagtcccctcggcttggggtaggccatcgaggatggctagtaggtgggagatggtgg

SEQ ID NO: 3 - DNA, 1010 bp, Propionibacterium acnes
  source 1..1010: mol_type = genomic DNA
atgaagaaaaactggttactcacaaccctccttgccacaatgatgatcgccatgggcacgacgaccaccgccttcgccagcccgcctaccgacatcactcccgaacatccaggcggggttacccgcctcacagccccgacggaatcccctcgaatattgaggggccaagtatgcccagctggacctctgcaatcaggttcgcaatgaagaaccccggcacgaaagtcccgggcaccaacgacttcacctgcaaaccgaggaaaggcacccatcccgtcgtgctcatcccgggcacatccgaggacgccttcatcacgtggtcgtactacggtccccgcctcaaggcagcaggattctgcgcctacacgttcaactacaacccggaaacacatccgcttgtggaagccgctgagaccagcggcaacatctactccacggcagctttcatggcccacttcgttgacagagtgctcaaggcaaccggtgctcagaaggtcaacctcgtcggccattctcagggcggcggccccctgccgcgcgcgtacatcaaatattacggggcgccaagaaagtcctcatctcgtcggtttggttccttccaacaggggaacacgcatgctcggcctggagaagttcctcaatgccagcggaaacccgctcagcactatcttcaatgctgcagcacagtttcgaaagctggaatccctgccccaacagttgcaagactccacatttctcagggaactcaacgcggatggaatgaccgtccccggcatcacatacaccgtcatcgccacccagttcgacaaccgagtatttccgtggactaataccttcatcaatgagcccggggtcaagaacatcgtcatccaagacgtctgtcccttggaccacagcgcccacacggatatccctaggacccgatgacccttcagattgtcatcaacgccttggaccccgagcgggccgccccggtcacctgcaccattcgcccattcaggcccagttag

SEQ ID NO: 4 - DNA, 2387 bp, Propionibacterium acnes
  source 1..2387: mol_type = genomic DNA
atggcgctcgccgcttctcccacagtgacggacgccattgccgcccccgggcccgacagctggtcggcgctgtgcgagcgatggatcgacatcatcaccggacgcagagccgcccggacctctgacccacgtgcccgagcgatcatcgccaagaccgaccggaaggtcgccgagatcctcaccgacctcgtatccggctcgagccgtcgaccgttctgatctcggcagacctccgcaaggagcagtcgcccttcatcaccaagacagcccgagccatcgagtcgatggcctgcgcctgggccacacccgggtccagctaccacaaggatcccgaaatcctctccgcgtgcatcgaggggctcagggacttctgccgacttcggtacaacccctcccaggacgagtatgggaactggtgggactgggaggacggcgcgtcaagagctgtcgccgatgtcatgtgcatcctgcacgacgtcctgccgcccgaggtcatgtccgcagcggcagccggcatcgaccacttcatccccgacccctggttccagcagccggcgtcggtcaagcccactgccaaccccgttcagcccgtggtctcgacaggcgcgaatcgcatggacctgacccgtgccgtcatgtgccgttccatcgcgaccggcgacgagaagaggctgcgtcatgccgttgacggattgcctgacgcctggcgcgtcaccaccgaaggtgacggtttccgtgccgacggcggattcatccagcactcccacatcccctacaccggcggctacggcgacgtcctgttcagcggactggcaatgctcttcccgctggtctccgggatgaggttcgacatcgtcgaatcggctcgtaaggctttccacgaccaggtcgaacgcggcttcatccccgtcatgtacaacggccagatcctcgacgacgtgcgcggccgatccatctcgcgcatcaacgagtctgccgccatgcacggcatctcgatcgcccgtgccatgctcatgatggctgatgccctgccgacacaccgcgccgaacagtggcgagggatcgtgcacggttggatggctcgaaacaccttcgatcacctgtccgagccgtccacccttgtcgacatctccctgttcgacgccgccgccaaggcgcgccccgtcccggagtcgtcgacgccgagctacttcgcgtccatggaccgtctcgtccaccgcaccgcggactggctaatcaccgtctccaactgttcggatcgcattgcctggtacgagtacggcaacggggagaacgaatgggcgtccaggaccagccagggaatgcgttacctcctgctgcccggagacatgggacagtacgaggacgggtactgggccaccgtcgactactcagcaccgacggggacgacggtggactccactccgctcaaacgcgccgtcggagcctcgtgggcggccaagaccccgaccaacgaatggtccgggggcctcgcatcggggtcgtggtctgccgccgcgtcccacatcacctcccaggactccgccctcaaggcacgccgcctatgggtgggtctgaaggacgccatggtagagctgacgaccgacgtgaccaccgacgcatcgcgggccataaccgtcgtcgagcaccgcaaggtggccagctcgtcgacgaaactcctcgtcgacggcaaccgggtctcatccgcgacctccttccagaacccccggtgggcccatctggacggagtcggcggttacgtcttcgccactgacaccgatctctccgcagatgtggcgacgagaaagggaacgtggatcgacgtcaatccctcccgcaaggtcaagggggctgacgaggtcatcgagcgcgcctacgcatccctgcacgtcacccaccacgatcgtccagtcgcgtgggcgctgcttcccactgccagccgttcccacacgatggccctggccacgcgcccaggagtcgagccgttcaccgtgctccggaatgacgcaaccgtccaggccgtccgctctgcgggtgccctcttgacgaaggaccccactgtcgtcaccaccttggctttttggaagccagctacctgcggcggcgtggcagttaaccgtcctgcgctggtgcagactcgggagagcgcaaaccaaatggaggtcgtcatcgtcgaacccacccagaagaggggatcacttaccgtaactattgagggaagctggaaggtcaaaaccgcagatagccacgttgatgtcagctgcgaaaacgcggccgggactctgcatgtcgacacggcggggctaggcggccagtccgtgcgagtaacgctggcacgccaggtaactcaaactccctccggcggcggccgccacgaccgagcctga

SEQ ID NO: 5 - DNA, 1113 bp, Propionibacterium acnes
  source 1..1113: mol_type = genomic DNA
atgcgtgttggtgttcctactgaggttaagaatagtgagtttcgtgtggctgtgacgccggcgggtgttcatgcgttggttggtcgtggtcatgaggtgttggttcaggctggtgctggtgtgggttcgggtattccggattcggattttgtgggtgctggtgcgcgggttgtgggtgatgtggagtcggtgtggggtgatgctgatttggtgttgaaggtgaaggagcctgttgcggaggagtatgggcggttgcatgagggtttggttctttttacgtatcttcatttggctgctgatgaggcgttgactcgtgagcttttggggcgtggggtgacgtcgattgcgtatgagacggtggagttggctgatcattcgttgccgttgttgtctccgatgtcggagattgcgggtcggttggctgctcaggtgggtgcgaattgtttgttgcagtctgctgggggtcgtggtgtgttgtttggtggtggttcgggtgtgcgtcgtggtcgggtgagtgtgcttggtggtggtgtggctgggttgtgtgcggctcgtgtggctgcgggtatgggtgctgatgtgacggtgtttgatgtggatgtggcgcggatgcgttatatcgatgaggtgtggggtgggcgtattggtacgcggttttcgagtccgttggcggttcgggaggcgtgtggtgagtctgatgtggtgattgggtcggtgttggtgcctggtgctcggactccgcatttggtggatcatgagatggtgttggggatggtgccggggtcggtgttggtggatgttgcggtggatcagggtgggtgttttgaggattctcatccgacgacgcatgcggatccgacgtttgtggtggggggttcggtgttttattgtgtggcgaatatgccgggtgcggtgccgcatacgtcgacgtatgcgttgacgaatgcgacgatgcggtatgtgttgttgttggctgatgagggttggaggggtgcgtgtgggtcgcgtgatgatttgcggcgtggtttggcgacttgtgatgggaagttggtgagtgcgccggtgggtgaggcgttgggtattgagtgtgtgcctgtgtctgaggtgttgtga

SEQ ID NO: 6 - DNA, 952 bp, Propionibacterium acnes
  source 1..952: mol_type = genomic DNA
atggacaaaccagcgatagagatacgcgatctcgtcaagtcgttcccccaggccggcagccgcgaacgcctcattgccgtcgaccacttgtcaatgacgatcaaccgcggagaggtcgtggccttcctcgggcccaacggcgccggtaaatccacgaccgtcgacatgctccttggcatgaccagacccgacagtgggaaggtcactgtcctgggctccgatccgagaacagccgcccgtactggttgcatcagcgccgtctttcaaactggcggactgctacccgacttcaccgtcgcagagaccatgaaggccatcgctgccgcacacgggcagcgctcgagggtcaagcccctcaccgagaggtgggagttggccccattcgccggaaccaaggtcggcaaatgctcggggggggggtcagcggcagcgacttcgtttcgccctcgcgatgctgcctaaccccgatgtgcttattctcgacgagccgacaaccggtctggacgttgaagctcgtcgacgcttctggcaggtcatgggtgaggaggccgacgccggacgtacggtcattttcgccacccactacatcgaggaggccgattccttcgcccgtcgcgtcgtcctcgtcagtggtggacagctcgtcgcggacggtcccatcaatgaggttcgcgcctcggtgtccggatccactgtcagagcgactctcactgatccctccgtactggccgagggtctgcgcaccttccctgggattaacgacatcaccgtccagggccagcaactcatcgtgcacactagtcagcctgacgacctggcacgtcaccttctgacctacaccgacgctcacgggctgctcatctcgacgatgacccttgaggacgccttcgtccggctcacaggctccaatgattcccgtgacgatgttgacgactgggaggcagcagcatga

SEQ ID NO: 7 - DNA, 621 bp, Propionibacterium acnes
  source 1..621: mol_type = genomic DNA
atgatcgataagaccatgatcaagctcgtgctggccgacgaccagaccctcgtacgcggcgctctggcagccctgcttagcatggagaacgacctggagatcgttggtacgtgtggtcggggagacgaggtgttcgcccttgtgcaggccacccatgccgacgtgtgtctgctcgacatcgagatgccaggtatcgacgggatcaccgtcgccgctgagctgagagaccaggcatcgtggtgtcgagttctcatcgtgacgaccttcgggcggccgggttatctgcggcgggccatggatgccggtgtggctgggttcctcgtcaaggacaccccagctgaggacctggcccgagtggtgcgcgaggtccatgccggaggtcgagttatcgacccagctttggccgccgaatccctcatcgagggacacaatcccttgtcggagcgggaacgggagattctgcggctggccgagtcgggggcctccatctccctcatcgcctcccagctctatctgtcggtgggcacggtgcgcaaccacgtgtcctcggccatcggcaagacgggtgctgcgaatcgcaccgaggctgccgtcacggctcgacagcgggggtggttgtga

SEQ ID NO: 8 - DNA, 707 bp, Propionibacterium acnes
  source 1..707: mol_type = genomic DNA
gtgaccgtcctgctcttacgcctcgcggggcccttgcaatcctggggagattccagccgatttacgacccgggccacacgacgggaaccgacgaagtccggcgtcatcgggttgttggctgcggcgcagggacgacgtcgcaccgacagtctcgaagacctgctcaccctgcgattcggtgtgcgaaccgaccagccggggtcgatcgtgcgggacttccagacagccatggactgggcacatcccaaaaaggacggccgcgtcaaagccatgccgttgtcaaaccgctactacttggccgacgcagtcttcgtggcggcggtcgaaggagacccgtcctcctccaggcgttggacgaggcaatcagagacccggagttcccgctctacctcggccgaagatcctgtcccacggaaggacaggtgtccttaggcgtgcgagagagcgagctggtgaagaccttggaaaatgagccttggcacgccaagctgtggcaccaacgccgactgggacgatccgtccgacttcccatcgcctatgacgccgggccgggacagatcggcgacaccgtccgcgacataccgctgagcttcaaccctgagcggcgcgagtacggctggcgcgacgtcacgacgacaacgattgtcgtcgacaaccccaacggaagcgacgagcccgactggttcgcaggcctagaaggagcttga

SEQ ID NO: 9 - DNA, 588 bp, Propionibacterium acnes
  source 1..588: mol_type = genomic DNA
gtgagtcgcatcgtcatcgtcaggcacgggcagtcgacgtggaatcgtcaagggcgcatccaagggcagacaatgggtattcccctgacgatgctcgggagacgccaggctcgccaggccgctcacacggtggcaggtctggtaccccacgacaccccgatcatcgcctccgaccagaagcgggcgcgtcagacagctcgtcctatcgcgcgggtgctgggcgtaccagcgacgaccgatccacggctgcgcgagcaagggttgggagccatggagggtcacaccgcggatgatctcgagccccttccccagccaacgggtgtacatccggccgacgtgcgatgggctggtggggagtcgctcgcggatgtggcggagaggtgccgcagcctgttggatgacgtggcagctcgcgacctaccggcgatcgtcctcgtcacccacggtgacaccatgcgggtcctgctggggattctcgacggtcgcagtcaccgcgacctcgactgggaccttccactgacgaacggaagtgtcatagcgcgagatgtgaacctcagcgagtcgcatcggcggctttcgctgtcgtaa

SEQ ID NO: 10 - DNA, 1010 bp, Propionibacterium acnes
  source 1..1010: mol_type = genomic DNA
atgaagaaaaactggttactcacaaccctccttgccacaatgatgatcgccatgggcacgacgaccaccgccttcgccagcccgcctaccgacatcactcccgaacatccaggcggggttacccgcctcacagccccgacggaatcccctcgaatattgaggggccaagtatgcccagctggacctctgcaatcaggttcgcaatgaagaaccccggcacgaaagtcccgggcaccaacgacttcacctgcaaaccgaggaaaggcacccatcccgtcgtgctcatcccgggcacatccgaggacgccttcatcacgtggtcgtactacggtccccgcctcaaggcagcaggattctgcgcctacacgttcaactacaacccggaaacacatccgcttgtggaagccgctgagaccagcggcaacatctactccacggcagctttcatggcccacttcgttgacagagtgctcaaggcaaccggtgctcagaaggtcaacctcgtcggccattctcagggcggcggccccctgccgcgcgcgtacatcaaatattacggggcgccaagaaagtcctcatctcgtcggtttggttccttccaacaggggaacacgcatgctcggcctggagaagttcctcaatgccagcggaaacccgctcagcactatcttcaatgctgcagcacagtttcgaaagctggaatccctgccccaacagttgcaagactccacatttctcagggaactcaacgcggatggaatgaccgtccccggcatcacatacaccgtcatcgccacccggttcgacaaccgagtatttccgtggactaataccttcatcaatgagcccggggtcaagaacatcgtcatccaagacgtctgtcccttggaccacagcgcccacacggatatccctaggacccgatgacccttcagattgtcatcaacgccttggaccccgagcgggccgccccggtcacctgcaccattcgcccattcaggcccagttag

SEQ ID NO: 11 - DNA, 20 bp, Propionibacterium acnes
  source 1..20: mol_type = other DNA
ggtatccaccgagatggaag

SEQ ID NO: 12 - DNA, 20 bp, Propionibacterium acnes
  source 1..20: mol_type = other DNA
gtggtcccaggtgacattct

SEQ ID NO: 13 - DNA, 20 bp, Propionibacterium acnes
  source 1..20: mol_type = other DNA
cgacatcgacgtttcatctg

SEQ ID NO: 14 - DNA, 20 bp, Propionibacterium acnes
  source 1..20: mol_type = other DNA
gtgttctcctcgtgctggtt

SEQ ID NO: 15 - DNA, 21 bp, Propionibacterium acnes
  source 1..21: mol_type = other DNA
gataatccgttcgacaagctg

SEQ ID NO: 16 - DNA, 19 bp, Propionibacterium acnes
  source 1..19: mol_type = other DNA
acccaccacgatgatgttt

SEQ ID NO: 17 - DNA, 21 bp, Propionibacterium acnes
  source 1..21: mol_type = other DNA
gaagaatcccgctccatttcc

SEQ ID NO: 18 - DNA, 20 bp, Propionibacterium acnes
  source 1..20: mol_type = other DNA
cctttcttgtagccgagcag

SEQ ID NO: 19 - DNA, 25 bp, Propionibacterium acnes
  source 1..25: mol_type = other DNA
attgtcacctgggaccaccgtaaac

SEQ ID NO: 20 - DNA, 20 bp, Propionibacterium acnes
  source 1..20: mol_type = other DNA
cgtgatcctgatcgactgtg

SEQ ID NO: 21 - DNA, 19 bp, Propionibacterium acnes
  source 1..19: mol_type = other DNA
gctccacaacttcgagtgc

SEQ ID NO: 22 - DNA, 22 bp, Propionibacterium acnes
  source 1..22: mol_type = other DNA
caggccgttgatcgtgagctga

SEQ ID NO: 23 - DNA, 20 bp, Propionibacterium acnes
  source 1..20: mol_type = other DNA
tgctgataatccgttcgaca

SEQ ID NO: 24 - DNA, 20 bp, Propionibacterium acnes
  source 1..20: mol_type = other DNA
acgacgtcgaaaacaactcc

SEQ ID NO: 25 - DNA, 22 bp, Propionibacterium acnes
  source 1..22: mol_type = other DNA
ctctaccgaagctcttgccgca

SEQ ID NO: 26 - DNA, 19 bp, Propionibacterium acnes
  source 1..19: mol_type = other DNA
atcgccgtcgacaggtagt

SEQ ID NO: 27 - DNA, 19 bp, Propionibacterium acnes
  source 1..19: mol_type = other DNA
ccgagattctgcgcctagt

SEQ ID NO: 28 - DNA, 21 bp, Propionibacterium acnes
  source 1..21: mol_type = other DNA
cggtgcccttgctgaggtaca

SEQ ID NO: 29 - DNA, 6363 bp, Propionibacterium acnes
  source 1..6363: mol_type = genomic DNA
gtgttgtggactctcggggtcagtctgtccgctcacttgagatggcttaacatttctgaccgacgccgaagtctacgaacgctgcgaaacgccaaccgacgcctttgtaaccaagccttcttcatcaagatctacatcgacgaagacgaccaactccgcgtcgagaacaaccgacctttcgaaatgctcctcgaccctcagatcaacgccaacgccctcacctgggcccagaacggcaacaaggcccgaatcgaaactaaggggttcgagccttgtgcgtggggttacttagacgttcattttgatacaaggatctgggtgggtgcacggaggggctaggtgggtgcattgcatcctgacaggagcgccgggtgagttctggttgactaccagcagcgtgttcggtatgctagaggatagttacgcgacagcgtccgttccaatttctgggagtgtgttaattccgatggtgctgtgatctccgttcggctacgccgagaagcgtccaaatgtttcgacggttttggggatcaatatgtctgctatcgaggtaatcaatctttctttttcattttccgctcagccactcttggataacgtttcattcagcgttggcgatagcgagcgcgcagtacttgtggggcctaatggctctggcaaaaccactctcctgcgcctgatacgaggagagctaaccccggatcgaggacatatcgccatcagtgatgcaggagatgcaggttcttgtcgcttcccttatgttcgtgacgccactggcacagttcaggactatctggacgacgtgttggctggcccatgggagttgctcactcgcttcgaccacgtgacgaagcaactatcggctgcccaaagttcagcgagtctcgctaaagagtacgatcacatactcaccagtcttactctggccgacgtatggtcgctcgaagctcgaatcgatgaagtgttagccggtttaggtctaggccagctgaccggacgcggtcgacagcgcgcactcggctcactctcccctggccaggcagtgcggctcgaactggcaggcatcattatggtcagaccagtaactctggtcttggatgaacccaccaatcatcttgatgacgaagccgtaggctttctgatccagcaaataacagattggccggggccagtgctcatggccagtcataatcgtgcgtttattgaagagacagccacggtcatctatgacctcgatattgccccgtggcaggctttggccacagctgaaggagaggctgtgtctggcgtgtaccggtgcactggcgcctatagtgattatcttggcgccaaacaacacgcccgcatggagcatcaaaagcttcacgccacccagcaatctgaaaaacgcgcgattcgaagtcatcgccgtcgtagcgaagatatcgctcgtggtggagtgaaattagcgaaggcgcagggcatggcacgtaagttcttctctgaccgggcagaaaagaccgcgctgcgacgcacgcgtaacgacgatcaacgcttacacgatcttgctgaacatgaggtgcgaaaaccccgcaactaccaacttaagctcaaccttccaccagtcggctcgcgtggcgggttagccgtcacggcacgaagcgccttcattccaggcaggcttctcccaatcacgttcgaccttgccacgggggaacatttaatactgactggcccgaatggagcggggaaaaccacgctcttgaattggcttgctagtgggaaaacaacaatcgaccctagatccgaagccagcggcactatctctgtcagcgggcggcttgcttacgtcccacagcgcctaccacgcacaggagattcctactttcacccagaacattggaaagacgggatcagagaacttggcacgggaatactccacccatccatgtgggccaccccagtcggccaactttcagatggaaaccagcgtcgagcccagatcgcgttagccgtggcgcagaaacccgagattcttgtcattgacgaaccaaccaactacctcgacctcgccacgcttgaagaactagaggacgcgctacgccaatggaacggcacactcatcatcgccagtcacgaccgctggcttatcaaccactggcagggaacacaaatcgaattatgccccacagatccagcgcccggatcaccgaatcccctcttactcgttaagagccggttcgagccgtggtagtgccgtccttgagtgtgagtttgatagcgccgtcgtggttgacggtggtgtgatcgacgagggtgttccaggcttggtcggagtattcgagtggtggttgggtggcaaggtagtcgcgtacttcgattgcttgtgctcggcggtggcgcagatcgtcgatctggtcgctgatccgttgatgctcggcctcaagttggtggtgccgatcttcaagctcgtggtaacggcggtcgtagtcgtcagggtcgtgggcggtcgtggctgcggggtgatgagttggttcatcagcgtgatggtttcttcgatccgctcccccagcgtggcctgcttggtttcgagctcgcgggtgtcgtagacggtttcgtcgagcaggcgcatggtgtcatcgagcacgtcgttgccggtgacccgcttagccagggctgcgacgaaggcgtctttgatctggtcttcggtgacgtggggtgtcgcgcagtgatgatccttgttgtatttgttgttgcagcgccagatgtagcggcggtatttgctggtggagtgccagactttccgcccaaacctcccgccgcaatcggagcaggtgatcgtgttggcgaaggggtgggtgttggaggtgcctttgcctgcgcggcgggcgagttctgcttggacggtgtcccaggtgacgggatcaatgatgggttcgtggttgctggtgacgtagtactggggtacttcgccttcgttgattttcatggtttggttaggaagtcggtggtgaagctcttttgcagcagcgcgtcgcctttgtatttctcgttggcaaggatcgaccgcacagtggagggcgaccagatttgtttgccacgcggggtggggatgccatcggatgtgaattctttggcgatggtttgtggggttgcgccttcgaggaagcgggcataaatacgacggacggttggtgcttgggtttcgtcgatggcgaggttgccgtcttcgcctttcttgtagccgagcagggacgcgtaggacaccatgattttcccgtcggcgaagcgtttacggtggtcccaggtgacattctcggaaatggagcgggattcttcttgggtgaggctggacatgatggtgatgagtagttcgcctttggaatcgagtgtccagatgttttctttttcgaagtagacctctacgcctttgtctttgagctggcggacgtggatgagggtgtcgacggtgttgcgggcgaaccgggacacgctcttggtgaggatcaaatcgatttttccggcgagggtgtcggcgatcatggttttgaagccttcacggtgtttggtgctggtgccagtgatgccttcgtcggcgtacatgcctgcgaattcccactctgtgcgggattggatgtggctcgtgtagtagtcgatttgtgcctcgtaggaggaggcttgttcttccatctcggtggatacccgcgcgtaggccgctaccctgcgccgacgccgagtaccctgcaccgtggtgtgtccgggtatttttgtggctgggatcgcggtgacacgcttgttccgaatctgcttggtggtcatatcgcactttcctcgtccaggctcaccgccactggcacttcgccgctaatggtgtggatggtgagcgtacgatcgggattgacaacgattttcacgaggcgcgtcagcgcatactcgtcgtcccagtcgtcgaggccaagcacgcgggtgcagatctgggtgagatgggtttctcggatttgtggtgcctggcagggattgcctttacctttggtggcggtttcgcaccaccaaaacttgtaggacgtgtggcggcgtgtcttggtgcggcggtgataaaacctgctacagacagagcattcaatccgagaggtgagcccggtcgttctagctgacggcgtggctccacgtccgagatgtctgcgccgggcgagctcggcctggacggcgccgaacgtggtctggtcgatgatgggcgggtgggattcgtcgacgaggtagcgtggcagctcgccggtgttggtatggcagttcaattctgcaacgtttggccggtaatacttttgcaggattacgcggccggtgtagatttcattttcgagccatttgcggatcgtcttaccgcgaaacttggctccccgcctaggcttgaccccttcagcattcaactgactgatgatcttggcttcagtctcgatgatagccaagtcactacccacgtattggtagccgtagggttggcgcgaatgcatgagcccgtcggcgtatttcttccttatcccccatttaacattcttcgacatggatcgagattcctcctgcgcaaacgatgccagcagggtcagcaggagttcaccgtcagcggtcgcggtatcgatctgttcacgctcgaaacgcactgagacgccgaggattttgagttcgcggacggcatcgagcaggtcgacggtgttgcgagtcagcctggatatcgacttcgtcaaaatcatgtcgatgtcgccggagcgggcggcggccatcatggtctggaacccctctcgacggacggtactggtgccggtgatgccttcgtcgatgaacacgcctgcatagtcccaaccaggggtggattgaatcagatgagagtagtacgacacctgggcggcaatcgaagatagctggcgttcgtgctcggtcgatacccgcgcataccctgctactcgtagccgacgtggcgtggcgggtctaggtgggataactcgaaaactacgcgaggtcactccctgcttctctttcttctatggcgacaggtgttttggttgtatccatctacgctctaaacctgagtcttatccagtcgaacctgcagcaacaatgcccccactggcgcggttgcttcatgcccgatccgcgtaaggatcacgtggctttcgtttggggtgagtgcgccggtttcggtgagccgatcaataaaggcgacctggcgggcaagatcgacttcggcattgaacatggcacccgtcacggtctgccacctcgggtgctgaagcggtgcctgatatagcaggcatgcgagcaatacttacggtgcttgtttccgtaggcctcgaagctctcaccgcaagcaacgcaggtgaaggtgtatattgcccgccggttgagccgttcggggtgggcgtgctaccacgacaaacgacacacatccgaacagaacctttgccccgccaccgcagcttcaaaatgcccattacagtgttcgcatgccttagcaggctcaacatcaaccgccggatcgatgttgatgtcagctctgcgacagatcgacttcaccgtattgcgcgacatgcccaatctggtggcgatctgcccatacgatgcgcctcggcatcgcagctccacaactcgctcacgggtaatctcacgtgccatgacgcgctcctgctcaatagaaataaggtctctactgacagggcttcgacccaccccgatttataaccaccactgtcctggtgcgatgggaacaaaaatggccccgccaccacctcatgtagtgaggcagcgacggggcgaaacaggacagttttcatgagtcttggtttagtggcggagtttttcgttgacccggcgctggacggcgtcgtagttggatccgagtctgcgtcggcgttcgttgccgttgccgtattcgccgcggatgaccgcgtcagcgagcgcgtcaatgttcggtgccggcttcggtgtgggtgcgggtttcggtgccggcgcgggtgcgggcgtgttgccggtcatgtggtcgtaccagtactgggcgcgagccatataggcggcgtgctgagtaccggccagcgatgctgggcattcggtggctgagaagtttttgtgcccgaacacgttcttaccccaggtagggcggccgagcttgtaataccgacagatcgcggccaccaaatgtgcgccgttgtcgaggcaggcgtcagagattttccatgggttagaagaggcgtcggcgtgctcgataccaatgctggtggtattggctgcccagtttccggcgtgccaggcggtgtcgcggtcccacacgagctgcccgatccgcccggaggtttctacctggtagtgggcggaggcgggccgggtctgccacac

SEQ ID NO: 30 - DNA, 20725 bp, Propionibacterium acnes
  source 1..20725: mol_type = genomic DNA
gtgttccagtgcctcgcgggcgtgatgttcttcttcggcaccttcttgccacatgcttcgcgcttcagcctcgccatccaagcgaacctggactgtgaacgagtcctcatcgggtccgtcctcattccacgcggcaatgatcccacgggcctcgtctgcgacctgactcaacttcatcgcctgcccgacagccccgagagccggaatctcgaacacccagatattcgcctcagccgagacctcacgatgggcgatcacttcgtaggtcgtctcaccttctactgtcgtgtccattacttccactccttcggaattttcacgcctgctcgctccagctgtgccaggacaccaactgacgtcagctggtgtcctgctggtatcgatacgcgcccggctccgccggggcgtccccagatttcatggcttcccttggcgttccgcagacgggcccatccttgagaacggagcagcttgaggacgtccttagttttctgcggtttcacacatcatagtatagccccacttaacttgtaaactaagcccctgtttacattttagttggtgcatgtgatccctgctcttatgacgtcgcccgacctggcgccttagacatgcactgttcatcctcaaccacactcaccgtcacgggtccgaaggcgaggtctatcaccattcgcatcgatgaagttgaagcaggatcgtccgcatcacgcactgccgatccggacagacgccaccggccgtaccgactgtttacgatctgccaccgcagactgctgccataaccgctatcacctctgatagtacgtttagtactatcagaggtgattcaagattctcctgtcgagcagccctacagtcacgaagtcctgcgatcgtcatcgcttaaggcagacggatggccatcggggaccactcgcaaagcaggggcgatcagcaacagtgatgtgccatgagcaagtactggtgcaccggctgtttactccgcccctagataaaccacgggtgcaggggtggacaccacaccatgaccgatgtggtgcccaccccatggctcacaggcaggccctatcgccgggagcactgctgcagatgaggctcagtaacctgccatgtctcacctggggccaaggtgccaagctccccacggaatctcaggcatcggaaaccagcagccgaacttccacagcatgagcgccctacgaaaaagcaggccgccgacggttctcaagaactcgccggcggcctgcatcgccactcgaactgtaaccgtggtccgaccccgtgcacaggtaagctccacactcccaccaggcatggccgaggcagtaccaagttgccgtggcccatcggcagatttggttaaattttgaaaagtcatatagactccttctgtaaatttttaaatctcataggactctcgccatcgccagccagcttcgacaggagtcccgatgtttcaccgagtgaaatatcggcaccgtttgagttgacctaaagctcaaaagatgctagaatccatcttacctcgttaggggcgttttgtcaaacgcccctatattgcgtgtcttcgcgcgtcgtagcgctgatgctgcgcctgtgtcgactatccgtttgtaagtactttcgatgacaccagcagtggctactcatgactggtgcgtgcgggtctaaagcagcagggaaaggaatcgcagtagaagccgcttgattcctatcacccctgatggtactatcagtactaacagagcagggcttactcgatgcgtgagaatcggggacatgctgagcctctcgtaggtcattggcctgctgggcgtcagtgtggcgcggttcgatccagtgaactctatcagctctgttagtactgtcagagttgatatattcgaccccaggaggagcccatgagttacatcgttcgcaccggaaatttggtcgacacccccgagctgcgtgagggagagcatggcccgtacacctacgctcgcgtcatcgtgtccgatcgcattcgccaggaggacggcagctacgtcaacgggccagcgatcgcctacgacgtcttggcgggtggcagccaagccgtgaatctggttgaagccgccaaggcgagcggcaacatccgcatcatgttcgcgggccgttaccgcgtcaccgagtggcggggtgagcagggcactcgtatccagcatgaggtccgagccgacgaagtgagcgtgagcctgctcggtcagagggtgaccgtggagcggcctcgaggtgacgtggcatccaaggagagcacgtcgttctgattgagtccgggggcacggtggtcgccgtggtaaaccgtgcccctgacagtactattgacactattggaggtatcagtgtgactgctcaaattttcgccttgtgcaaccagaagggtggcgtcggaaagtcgacatcgacgtttcatctggcccgtgccgcggtgttgcgtggccagcgtgtgcttgtcgtcgacaacgacccccagggcaacctgacgtctgtcgcggccgccgagcccgtgggggaggatcaggcggggctggccgatgtgctcagcgcgcgtgctccagagaccctccgcgatgtgatcgtgccgggaatctggtctggcctcgatgtcgtgccgacgtctggcatcacgctcggctgggtgcgtgacgaactcgtgatcgccggtgccggccgagaaggccggctgcgggaggccctggccggcgtcgaggacgactacgacgtgatcctgatcgactgtgctccatcgctcgatcagctcacgatcaacggcctggtggccgcccagggtgtcatcgtcgtgacgcactcgaagttgtggagcgccaacggcctcgcccagctgctcgacaccatcgacagcgtgcgcagctactacaacggcgcgctgcgcgtggcgggcatcatcgtcaaccagcacgaggagaacaccatcagcgggaaaacctggctcgacgagctgcatcaggctgccgagtcccggaagctgaccgtgcttgacccgccgatccccaagcgtgtcgtcatcgccgataccgtcgaggccgcgcgcggtctcgacgagtggggaagtgccgaggcggccgcgctcggccagttgtacgcccaccacctgacctgcatcgaaggagccctgtgatgacccgtccagccccccgaaagtcctcattgagcggatcaactccggtcgccccgccggctcagacggcgccggcaccgtctgccgcacctaccccccacaaggccgatgagtcacagacgagcagcaccacgaggaagtggcggcacaaggtgtcgttctaccaggacccggccgacaccgaccgggtgcgcggggcgatcctttacacgatgacgaccgagggcaaccggaacctgagccagttcgtcaacgatgccgtcatggccaaggtggtcgagctggaagtcaagtacaacgatggccagccattccccgctgtgggagcccgaggactaccccagggcggtgcagccgccgccggtgagtagaggaccatcgaccgtcgggggcttcaccatgcccccgaccctcggtcatcctgatcctcttgtcgatggtggtgacagtgggggattcacgcctcgttcagatcagaggaagtctcaccgcgtgattagtactatcaaatctgacagtactaacagagcagatagggttccctaggtcgagctgtatcacgccgacaaccagtgagccagtgatctacgaggggcgcaatatgcacccgatcggtagccgcgaaggcctcgccctgccccgatagtactatcaccactatcaatggtgctagtggtgagtttcttccattgatgacaacagcacagtgctgccgtctgtgtgcgggccaccagcccgcacacagttgccgtcgaggacgttgttcatgctctgtggtggccggtcctgagggcggctcgcaggatctcccggcgctcacggcgacgagcctggtagccaaggtctgcatgttcggcggcgagacgggctttgagggttgcggcttctgcacggcggtggagttggtcgtcgatgagttgggcgcgggccagacgccgcttatgggggttgtcgtgggtgaggggggcgtcgaggctgccgtcgtgggttagggccagggctgctcgttcggcgtcgtcgaggccgatgtggtggacggtcacgggtgcggtggtgacgtcgaggatgtccaggtggatgttgtggccgccgccgggggcttcggggaagtctggtgggctggcctggccggtgtcggggtcataccaggacaggccgatgatctcggcccagggtgggggcgggcagacggctcgcagaagggtgtgggccaggaacgtgttgcgggccatgatgcctccaagggtgaaaagcagtcgagtagcgatgacggcggggtagccgtctgctgggctgaggccgaccgggcccatgtcctcgatgctcttgtgctgcggccataccccaaagctaccaaacagtctttttaatctcaaagatacaaacagtgcttgacatattatctgcagcgaaagatactttcatcatggtggctgatcatgattacgcgactcctgacgatgagtggatgacacctcctcaggtggcccgtgtgattccgaacaccactgctcaggctgtccggcgctgggctgaggagggtcagcttcctggggcgtttcgtactccttctgggcgttggcatattccgtggtcggctgtggtgggcatcatggggtttgatccgcgtgagtccgcatcaccgagtgatcgtcaccagagctgacagagtcgtcgatgagctttcgagtgcagagctgatggcacgacggtctggatacttgtggagatgagagacgaccacatccagtcatggtcggggtacaccgaggggcagattcagcagtgctggcacgatgaggttgcccctgccattgactcgctcatggagcaggtaaggtctgttgccgagactcctgtgccgccgggttcgagattttacggcgatgagcagtgggccaagccttttcatccgtctactgcgatctgcggttcaatgggtccgccagcgatcacttgcacgcgctgaagctcctcgtctgggaagcgaacgtccaccatgtctatgcgccgtacacccttgctcgtgcatctattgaggcatcgtctactgctgtgtggctgttgagcacgaagacgcgcggagaacgtgtgctgcgagccttgcgatggtacgcgcaggattgtcacgactcgtgcaggttcatggatgatgagcagtatcgtgaccacctattgcggcgcattgaggggactgtcgctgcgggaaatctcgactcgcgcgctgctaggaaacggtaccgtgcaaccgatgttgtcgatgaggctgatcagctggttcccggaactctgagggcgtggcgagctttttctggtatggcccattcccgtatgtgggcatccagggggctgctcgacatggaagtgctgtccagtggccaaggaatggttacggcgaaggtgacgagcggatcggcccaaatcctttgggccgtcgtggcagctctgaatgttgctctcagtgccgctcgcttgtggcgtgattcgatgtgctcaccgtttgctgttgcccagtcggtagacgcgatgccagaggcgtttcgccgccctgtttagggtctgatcggggtagtgggtgttcacggggtcccaggttggccatggggcggcttggtgatgtgagttgggttgtgtggcagcctgggtgttgggtgtggcttcgttggccacgaaggcatgctcttccttgtgctgggacttgagtccccagtgctctcccctttgctagtggggggtggggtccccggaggtaggtcctccggggactttttctatgtctgtccgtgccccaggatttcgtatctaggcagtaccaattttgggttagttggaggtttctttggtaatggacagggtgagggtgatgaagaggtggccgtccttggtggcagaaattttctcgaacttcagctgaatgttgttatcagccactatctgttgggcggtgaggtgctcggagagcttctggaatccttcgcggatccacaggttgtaggggttggtgaccgagaccgaagggtatgggtcgaccttcagcgtcaggactggctggtctgggttgagggagttgatcttcaccagtttggggtaccggtcgcactcatgtgtctcttgtgttgggggccagcagtcgggggcccattcctcccagtggtcacgcatctcacgaagtactttcctgcatctcagcctctgcaggagctcgcgcgccaccgatgggagggctgccatgatgagggcaaggactgcgaacccgatgatgtaattgaccgtgtccctcgtcacgccgttcttgccgaggattccgatggcgaacgcgatgacgacaccgcccaggcacaggtgcatggggtcatgctgtgatggtttttcttcttcagcgactggtggggctatagtcatgtgtgccccttagtactaagtgatactggtgggttgcttttccccggtggccgtgtgcaagacggccaccggggttttccttcatgttcctgattttatctgcccggtgtggcgttttcatctttgtgtgggtggttcgcctggggtcttggagtgtggtgacgcggtgatggtcacggtgacggtgactgtggcgcgtggcgggtgaggtggttctttcctggtctggtgtgtggcccaggtgagtgtggtgatgagggccagggtgaggatgatgaccagggtggggagtagtttgtctggccggtgtcgccgggcttggtggcgcggcatgtttttccagggtgtgtctccgaacaggtcgtcgtcggaggggtcgtcgtggttcatagggtggccttggcgatggtggtgggcgagtttggtccaggtgatggtgccgtcggaggcgatgtggcggtcggcgggcagggtgtggacggtccatccggcgtcggtgagggcggtggtgaaggatttcttgatggatcgtttgggtaggtcgatgggggcgtgggtgccgacccagatgcaccggtttttgaggtgggtggcgccgaggtggttcatgtcgcggaccatgttttgggtgagtgtgagggtgtcggggtcccattggacggggatgatgatgtggtctgcgatggtgatggcgtgttgccaggcggcgtcgaggtcgttgtttccggtgtcgaggatgatgacgtggaagcggcttcttagggcggtgatgatgcggtcgaggtcgtcggcggtggggggtgtgatgaggctgttgtggttgtcggtgatggtgggtaggcatgtgatggtggcccagccttctggttgccaggagatgtaggggccgaggtcgcggggttgggaggcgaatcctgggtgacgggctgcgcgggcgaggtcgatgacggtgttgtcggtgtggcggggtgcgcgggtggagagggtgccgcgtgggttgatttccacgacgacgatgtcgtcgtgtcctgctgtggtggcgagggcttgggcaaggatgacggccagcggggttttgccggtgccgcctttgaggttggcgagggtgatgatgtggtcggtgagttgggcgggtgcggcggtgtggtgagggttggcggtgaggttggcgatggtgaacagggcatcgagatcgtcggtggtgttctgctcggtgggttgggggtcgccggagatgatcgggtcggcgcggcgcggctgccatgccggcctcaccactgtcacgaccaccacgggtctgctggcgctgtgtgggtgtcgtcggcgatgactcacgatcggcagtctcaccatcgtctcggtgatgctcggctagcgctggacccggtcaagttcgggccggctcacccagtggtgatgactcggtcacagaaccgctgccggtcgttatctcggacgtctcgactcctccagtcctgatgggcgttggagccacctacacctactctcagaacgaccccgacctcgtgtggggcgggggcagatgtcacttgggccaatcgagagcccaggtgatggggaaagcaggggtgtgatatctgtcctggaaaactgggcagctgctaccgtggattgacggatctccacgaaagaagggaatgcgaccatgcagatcaccgtcaagaccatcaaagatcatcgggttcgcactgtccagaccgccatgagcagcgccttggggattggttcccaggtagacatgctcgcccccggcggttccaccagctcgagttccggttcatgctgctcgtgctcgacctgcgcggtagtggcgcagcctcaagactgaacggctggtcagccccaggggcgtggcgctcatcgcgtcacgccccttctattcgctggacagggtgcgcgagctgaggaacatcgcggtgtgtgcgatgacgaggggcaggagcaagtctgtgcgggttgccaagtagccctgcgcgatggccatcacgctggccccgacggcggcgaagacacctccgatacgtcgcttcatgccgccgaattgcatcaggacgaataggactcccgcggtccacatccctccgggcatgcatctgggaaagatgaaccggaagatgatctcttcacaggagagctggagtactagcagcgtagcccccacggggagactcacctctactgacagacggatcgtcttcatccacccacccgagctggcatcgaccatttcggtggccatgcgcgaccggtggcctcgtgcctctcgctgcgtgtcgatccagccgagcagtccgtggacgctctccgctaggactcctgacgcgacagtctcaccaattcctaagcccacggcgaggaccgcgacgcccccctgcacggcaggctgtgtgacttggtggtcccaccaacccgccggcaggaccatgcgtgcgaggctgcacacgagcaggaggtggagggtcacgacgagcgacatctggaataccgcttgccgttcggcgatggtggcgttgggaaagagcggtaggccggcacgggcagcggcgctcgacagcttccgcaagagcggtttggagacgaagtagtaggcgacgtacagcgccagcgctgtcgcgatgatgatcatcggtctgccaccgagctgacccgccgatagccgtttctgttccaccaatactggctgttgtagatcaggtggcccagaacacaggcccagatcccccagaagatgaacaggatagtccccaaggcggcgagcgggatcttggagaggacctgtccccgtccgaacaccgagtggccgcaagcaaacaagagtgctcccacagcggtgagcgcgagccaggccggggttgctcgcagactgatcaccgggaccccgacccggaagccgacctcttctcctacagcgatgactagcaactgccacagcggcatgttctgaacggagcgcgcgactcgggctcgagtcacccacacgggctgttgagcgctcacatcaccactcaggtaccccggtgaggcacttcgcttagtactggggcccgatgtgcgagcattcgtgatgtgtcgcaggatccggttgtcaagccaagaggccagcagggctccggcgacagtgacgggtagcccgatcagcacgaggccccagccatgcggtgccgagaggtttctggccggcgtgcacgcgaggcaggcaaatgccatcactgccagcactacgacgtagatggtcgcataattcgacttgcgggtgacgttgccgaccatcttggccaaagtcgctggggaccagctgatgagtgcgatggtggtcagcaggaagcaggaccagacagacatccggcgcactcaggggtatgggtgcggctgtgggttttggaaaccgccatatgcggcgtagcgggggtgtgcccgcatgggtgcgctgggcagtgacagggcgagcagcccaggcgcccagagcctgacacagtgcagtcccagcccctggatctctatggtggtgaaatcttcgatgtacaggggtgacacacaggtgatgctgttgaccacgctctttaccagttccgcccccgtgtgggtgtcgtcaggtggcaggtcttcggcttgggcaatggtgcccgcgtcgaatttcgccacaactgattgcgcggcctgatagttcctcgcgtagtaggagacgttcgagtcgaggtcaagcatgtcctccgtggacatactggacgcgtcggcctcggcgtcgaaagacgtccataccgcgagcatccgaaccccgctgcactcgagaaacgccttgtacatggctgcttccagacccgcgtctgcacctaggccgacggcgacgaggggaagttggttgccactaccgaccatcatgcatgccacggtgaaatgcttgagcccgggagtcggaagccagtagaaacgcagttcgtggcttcggcccgctgcacgttccacgagccgctggatgcgctggaggcggggtccttcgacgcggatgcgcacaggtgacgaggctccataccacaggcccatcgcggcatctacctggatcaattcataagccgcggacagcgttgcggcgacgcgtgaagtgtggacggcggtgccggtcgtcacggccgttcccagccacggctcaccgtcgtgccgacgggggttgtaacccaggtaaaagaactgcgccgggatccactcctgccgggaggtcccgacacggggagtcttgacccatgtcatgggcaagtcgtcgcgataggtgtcgaacgcacctccagccactcgttgcgcgaagccgaatgcgcccagatcgagaacttcgtcctcggtccgggcgaggagttcctgacgagtcgcccagcgccgttcgaagggactatggagaatcccggtacccgcgcagtagcgctcgacggcctccgcgtagaccttgatctctgcctcaaactcgttcagccccaccccaccgatgtggtagctacccggcttggggtcgggccggtcaagcagtgcgtgcatccccgtgagttccccaccgttcacccgcacgcgggggccgagcgcggggtgcagcgagtagccgacggaagtcaccagcccgcatagcgggctgtaggtgcgccgcctgagccgggctgcggtctcgacggggtcgctatcctggcgaagcttcatcgctcgccccctgccgccagccactcacggatgtcgtagtacaggtccggagcggtttcaacctgcgctggtgcatcaaaacgggacataggtaggacgtcgttgtaggcgatctccatcgtcggtatgtagaccgacaacactttgttgcgcgtcgtgttgaggccgttgcgggcgatgctgacagcctcatgcgcgacgtgcgcggccaagatcgcgcgcaccgacgctgccacggccggcgctccggcccttacgcggtcggcagcggccacccgcatccaggacaggtagctctgccgttcgcgcaggttcatcgcgacccgctgctcgaaggtccggtaggacgaggtcgcaccagggacgacgtagggacccacgtacaaggccggcccgtctacagctgcgtggagccacgacaggtgggcgcgtcgggcgaacaggtcaagggcgcgcagcatagccgggttgttctgcgccagcgctaccacaaggagtggctgcaggtccggcgccgaacccagcaacgccaacatctgggaggcctcctgctccatgtgcaactcgtcggccgactgctcaagccgcaggcctgcgaagagggtggctgatggctgcgtgtcgtcagcgaggacggtagcctgcagcccctctccctcgagaatctgctggatatcgccggcgaggagcgcgtcgtcgctgaatacccacaccgggcgcgtctctctacctccatccatcttgtcctcaacgttttcgaccagcgcaccgatcgatgctaggtgggccatcacgtcgtcaagggccgcgcgggtcaatccgggcacccgggacacgatctcgggcggctgcagtccttggctcaacaagtccaaggccggccacagggtcccggtggcgtcgtcgtcctccagcgttgtgctctcggcgttccagacgcctcgacggaactccaccctgtccatcgagtaaggcaccatcatgaggcccggtgaaatgtggttggtcactttggctcctgtacagcctaggcttggacgcccacggtcatggtgtgggtcgcggtttggaaaatcccgtcgaggttgagtgcctgattgagttcgtcctcgtagaagcttgaggactcgactgaggcaagaccgagccccgtgcagaccaagttgatctgttgtgcgatcgccccgacttcttgaagggcgaacctcaaacccctggctccgtacttccgcatcgccctccacggcgagatgacgaacaccaagtgcactccggccgcatccgattgctccacggccggctcgccggccatcgaattcctcacgccgcgacagccctcttcaccggtcacgggcaccagtcgatcgatgaccggcgagtagcggtagacgccgcgactcaagccggacacccgttgtgcggacatgaagatagacacgggatacagccctccaccagacgggacagcgcgtacattataccgcacgatatcaccgctcgaacgtgggacatccacgtgccccgtcacaccggcagcacctctcagaaacgcagctacgtcacgcaggtctagggattcgccggtgtagttccgtccgctgcgccggcgggcgatcacttgctcgaggggtgcgcgcaccctgctggacctgggaagttcgatcacatcggcagcgaacgtgtcgcgatccatctgtccgtacgtaacgatcatggggtcaacgaaatagtcgccgaccgagacgttgaactccatatccccccgggcgatgcgcgaggcgagcaagaagtctgcagctgcgttagacagccccggcccatcagtgttgtcgcagcggaactcgtgggtccgaaaccccacaccttccgtgcccgggctctgcgctcgatacgacgtgatcgcagaactagccttccttaaaccgcccggagtagctaccatgaccgtcccctctgaggtctcccgaacacttgcgacaatagcagcatgtgggggcagccgccagaggcgggcatccttgtctcgacaaccattgacctccggattcgatatgtgcataatcatagtcgtgccaacacgaaacgtgtacgtctcggaagacgacctagacctgttcgccgaagccaccgagatcgctggaggcctgtccgcagcggtgttggaggccttgcgcagctacgtagacaggcaccatcgcgcggccggcggattcgacgagatcgagctggagctgcagaacgacggtatcgaccaccgtgtcaccttcatgggtcgccgcctgatacacatccgccgtccagatcccgagggaacccgcatagacactgtctacttgaccgccaaacaccaattcgccgttgccaccaaaatccaacgacggctgccagactggacggccggccacgagcacatctggtccgacccggagacctggaatcgggagttctggatcgcaggtgacaagacgatggccgtgtatcccagccttgacaaactccgcgaagctgaccccaatgtggccgaacgcgccgaggccgcggtcaaaatcccgccgttcgaggtcctggacatctgatgacagaatcatcatcttcccggcggcaattggcaatgccggtgctgtcagtcacggatctagccaagaaatacgtggttcatggcggctacgaggtcccggcactcaacggtgtctcgtttgacctgcacccgggagagatgctgggtttgttcgggccaaacggtgctggaaagacgacgctggtcaggatcatcgcgggcctcttatcggcagattctggagacgtccactggggatcggatcaaggtcgggccaggttaggctacgtgtcccaaaagggtggactgcagtacgggctcacgtgccgggaagagatggtcttccacgcacaatgcttcggccagtccgccaagcaggcccggactagcgtcgacgaggtcgccgcgatgctgcactgcgattacctgatggagtgggacgtcggaaggctctccggtgggcaacgccgaatcatcgaggtagggctagcactcgtcaatcaaccatcggtcgtcctgctcgacgagcccaccctgggcctggaccccgcaacacgcctgtcgttgtggcaaacggtaaagtcggcacgccgtgagaccggtgctgccttcctcgtcaccacccactacattgacgaggtggccgagcacctgtccaacgtcagcgtgatcaaccacggaaccgtcgtcgccaacggctcgccagcgcacatccgagaaatgttcgcgaccggggaagtaacgctcggcgtggccgaggatacggtggacagtgcggtggacgtgttggctgggaccgcgttcgaggcgcaccccaccgaaaccgtcccggggatcgtggtcaggtccaggcatcccgacgtggacgcggccaagatcatcaccatcctggctggtcatggcatctcggtggactccatatccgtacgcgaggcgaccttggaagaggcgtttctcacgatcacaggcagtcgagacccggagaggcaaatcccatgaacacttgcttcaggcgatatgcggcgatgtcgctgagagcgcggcgtgatttggccctgacattcatccagcccctcgtctacctagccctcttcggaccgctcttcgtcacgacgatgaagatgtcgcagagagctaccgccgctacgggttactccctatacatcacgggcctgtccatccaaatggccatgacgatcggtgccttcgcggggctaaccatcatcctcgaataccgactcggcatcctcgaacggatctggagcacccccctcacggggagcaagatgatggcggggcgaatcgcgcgcgacgtcgttatgatgatgatgccgatactggtcgtcttcatcatcggcctggtgctgggaacacgccccagcccactgggcctggcgacctacttcgtgacagtgctcggcacaggagccacgttcgccggggtctcctacgcggtggcactcagaacgaagagcgaggcagcgctatccgcgatcttcaacctcatcctgctacccatcctcctgctgtcggggatcatgctgcccatgtcgttcgcaccacactggatcgccaccgctgcccacgtgaacccgttgtggtacctggtgcaaggcgcgcggaaccagttcagcgttctagggctcgtggcggcggccccatggagttgggctgtggccatcgtcatgtcagccgctgccttcggctgggcaagccacgaattcaacaagaggcgctgacacaaagaatggtgccgggaacccaggtccccggcaccaccgagtgcactcgcgacgtcaacgcaccgttgcggtcactgcgcaggtcgagcacgaggacgacgagcccgcgctgctgcaggtcgagccgccaggcgcgagcaggtcgacgttagcgtcggcgccgccgaagacggacgtgacggccggctgagaggtgcggatgcggtgctccagcgaggaggtggtggtgagtttcatgggaggtgctcctaggagtgagacgagaacaaaccctagcgataggttagcagtccgcaaccgactccgggaatagtagaagcgcgcatccgtagcggaagaccttagcctgattacagtgaccctgttcgcgtctcaacattattccacacccccgagcagcgaacgacaccgcgatgatgatccgtcgcctctccaccgaagaactccgcgcccacatcgcaccgggccgccgtcccgtgcatcagacctgccgtcaacgtcggccatgaagctgggaaggtggctctcgtctaggagcagacgcgggacgcctcctccaggttgggccggggaagtgtccggttcttgatgtaggtggcggtccctattgatgggcgttgaccgtgggaatgcggtcggcgaagggggtggcgaacccgttgagcgcaggcttccagcgcatgcatcaacgctgtctgccggccaccggcaagcctcacccgcccgtcatggccatcatcgaggtgccggtgaatcctcgacacatgatcccaactcccccggaggggcttccggggctgttcagccaccagatcagccaggcggcgagcccgactctgccacccggaccctgcagagcgtgcctgctgccgtcgtgtcgtgtcgggccagtgggccaccagatcggccacatccgtcttggcccatctccagcccgccagacccagggaggccatcacctcatcgacgccgcgccgggtggtctcatcaaccccgtcaaacagctcgggccacctcgatgatgccgtccgtgaacgatccagattcatgacatgctcctcttcacagatgccgacgacgatcaggccgtggccgtggcaacggggtgacctgccggcgcggctcacgacgttgagccggaaccacacgagacgcaccagtgtgctgcgccgtcttgagtcgggcgctgtactgggccctggcgctgtggtgaacagcccgacgaagcaccgaccgccggctgtcctcatcgccagggcgaggcatggggcgcggcatggtgcgcccggtagcagcatccatgagggtgatccggtcagccaaaatgccgagccggttttcccacttccggggccacggcaccagcaggtcacgctgacagcccacgccgtggcgtcggcagtccacaacattttctcacggccaggatgcgagtgcagcagctccaccggaacaccagcatcacgcacccgccgcatcgtgacctcatcctcacgtgccaccagcgggggagagcgactaccgctgcagccggtccaaagcgactcttcacagatgagggggtggatcggtagctgacccctaggtcctgatgtgggtcgaggtccttggaatgatggaagttcctacacacccatcgccaaagacctcaacatggacaacgctaccttcaccactccctcatccgtgaagagccagtttatgcacggtgttgaaagaggcgtcggtctacgacgaatgcgggttaatggtcttgcggtgtggggcgctgggcgatggcatcgagaacgcgtgagtgggtggcgatccattcggccgcgtcggggttgatgttgcgggcgacggtgtcgatcgctgttacgtagtgggcaagcctgcgaatctcagcttgttggtcagggtgatcgctgatgagaggctcttgatgggaggcgcggttacggacgtggcggatgagctccacgttttcctcgaagtcgcgtcggctacgccccgggtagtgaggcatacctccgttacgtaagtcagtgagagctttccatacggttgcttccaggcgcggggtgagcagaaagcgccagttgtccagtgacagactcgccacgatctgatcaggggtcgcatcgagcctcgcgcgccgcagtcgcttctcggccctggcgacgttacgcgggaaaccaccgagccgatagctcggggattcccaccaacgccgtatgccagtatcggcgctcaggcgcacgtcaatgaagtttctcaggagtacctcgacatggctgatgtcttccaagaacgctttcgagatgcgggtgttccacacgtaccacgcatcgactggttcgatccggtagcggctgagcctggcgggtgagaaccactcctgcaacgtctcacgactcaccgtgggagcgtggtaggattgatgacgataggcctcgggaaggtcaatgccgcgaaatatcggtatacccccgaggccattgtcttgcccaggcccctcctcgcatacttgcggggcgtcattggctgccgtcatctcgtctcttcccggtacgtggctgtccatgttcacgggcaggtacggcaatgaggttcccgcacacaaacctctaccaagcatacgctggcaagcccccctctcggccccaccacaacatcaattgctgactcgaacacctttgaggcagcgctttcggcttgcgcaaccccacccacgacaccgtccgcttactactcgaagctgagggattcagaccccacctacaccctcgattgtgaagagcctccaaagcccgatacaacgtctggcgagacaccgtgaacgacctcgccaccgcagcaacgcaccagcagcgcgggatggcttggtattagcccagcgcagggcccccaggcaccagccctaacgaccccgcacccgacgtggctagaggataagccgcacgggaggactccatacccgccgactcattccagcccgccaccagccgagccatatgatcaaccgcccgcggtaaataatccagccactcacgccggtcgtacaaggaaccggccccgctccaggcgtgtgcccaggatcgccacaacacgtcgagctcgaccaccacgcccggaatagattcccactccaaatccggatcagcggccgccacgtaccagatcggccacatccgtcttggcccatctccagcccgccagacccagggaggccatcacctcatcgacgccgcgccgggtggtctcatcaaccccgtcaaacagctcgggccacctcgatgatgccgtccgtgaacgatccagattcatgacatgctcctcttcacagatgccgacgacgatcaggccgtggccgtggcaacggggtgacctgccggcgcggctcacgacgttgagccggaaccacacgagacgcaccagtgtgctgcgccgtcttgagtcgggcgctgtactgggccctggcgctgtggtgaacagcccgacgaagcaccgaccgccggctgtcctcatcgccagggcgaggcatggggcgcggcatggtgcgcccggtagcagcatccatgagggtgatccggtcagccaaaatgccgagccggttttcccacttccggggccacggcaccagcaggtcacgctgacagcccacgccgtggcgtcggcagtccacaacattttctcacggccaggatgcgagtgcagcagctccaccggaacaccagcatcacgcacccgccgcatcgtgacctcatcctcacgctgccgatcaccgtcaaccagatggtcagccacgatggtgttcacaccccatgactcatgcagttgcctggccaaggcgcccaacacctgctgacgcacctgtgacttgacgtcatcatcctccagatcctgtgtaccaaccatcacggaggccaacacatcactgcgttgctgaaccagggtgttgacgacgtcgacatcgtcgatacccatgggattgttggcgcgcgcggccacggcatgaaacgtgttggactgcaaattctcgaccagaccacgccgatagtcgttgaactgggaggtgtcggcaatgacaccggtcatgatgtaggccgacccctcggacaaggccctgtaggactcgtcgacgaacgccaccaaccccggccgccgccggtaaagtcgacctgcttcctcgtcagccagcaaccatgacagtttttgccccatatgtcctccttgctgacatgacctcgaacatggtaaactttccgtaggaaaaacggggcaagtactttcgagcggctacctcggcccccggtgggctgtccagccttgtgcggaccgaagccgggggattccttatgtttgcggcaatgatgccgctgcaccccctcatgccgtggtgtggtcctttccccgtgtgcggtgtggtgcgtcgttgactggtttgtggccccgagccttactctgaccggtaggagaacggtgtggggtctacggatagcccactcggctcccggtggaatgtccaacagggtagggttgatgagttggtccatcaggaccgtcccggtggctgcgtcaatgatcgatatttcgatgatgcgcccgtccaggtcggtggtttcggtgtcgaggatgactccgactccgggttctaggagttggggatccaatgggtggtcatcgtgtggctcctacagggagtgtctgggctggacagcggtgcaatacccgcgccatagcggttttttctgcgggggtgacccacagctggtatttcgttttgacggcgatttggcgggccacgtagtcgcatctgtaggccttgttagggggtagccaggtcgctgcatccctgtctcgtttggcctcattagcgggtccgtcgacagccagcaagttcaacgggtcgttggccagggcggtgcgttgcagcggtgagagtttttgcgcgccggtaatccacgcgttcccgagggctacgacgtggtcgatttggactgttgtcgaggtgtgccggccgcgccgccaggcgagtgtggacccggtgtaggggtcgtggagtcgcccggagacgaccacgcatcgtgatccgggtttcaggtgggcctcgaccaggtcgcgggcaagggcatcgttgcgggtgtcgcatccgttgtggccccaggggcgggtcaa

SEQ ID NO: 31 - DNA, 56169 bp, Propionibacterium acnes
  source 1..56169: mol_type = genomic DNA
tgccgacgccttcggcgtcgggtgagcgcgtggataggcgccccttcggggcacctgtaagcctgtatcgctgcggtttacagccttggccacccaaaggggcagcaaggggcccggagggggcattctgcgccgctgatagcatctcacatgtgagttattctctcaactatccttcaagtcaagcgtattagattatttatctagtactcttgacagtccgtctatcgggctatatatttataagcagaacgagagatcgggaaaggaatcaacgatgaagtacaccgcacacgtcaacatggtgaccaagccctacatcggacttcccactacccgaaccccctacaccctcgtcgacgccgactgggccacaacatggatgatcgacgaaacctacgaagcccactaccacggcaccagcgtggagatcagcatctacggcgaaggccccaactgctccgtactcaccaaccgcatctacaccgaccagcccaccgatgtgaccgctgcactcgccaactacggcttcaccatcgacaccaccaacacatccaaaaccatcctcacgctcacccgcacagccaccatctcccacctactagccatcctcgatggcctaccccaagccgaggggactcactggctcaacactcaacccgacctccaccacatcaccctcgacgactccaccaccggctgggccaccaaccgcaccgacgacaccgacaccggcgtctgctacgacaccagcacccacaactggcagatctgctgacagcataacgggcctgcccttgaagggttggactctgcacccatttcagccgggtacgttgccggctgggcgaaggaagcagacggcgccgcgattgaagctgccgccgagcacgtcgcgaagacctcccacgcgattgccgaggcgttgcagctcaccgcacagtgagccccacggggcgaccggctcaccccggtcgcccctcaccccccgacaggggaaccgttcccgccgcctgaatctccatacccctgatacgtactacgcggggtcgaggagtggactcccccaccctcgtgtagtacactatactacacagtcattgaggatagaggtgacgtcatgagtttttcgatccgtttaaccgaccatgagcgccgcttagctgattcctacgcccgcctgcactcgcagtccctgagtgaggctttcaagcaagccctcttcgaccgcatcgccgacgagttcgatctgcaagtagcccgtgaggcactcaccgactacgcccgcgacaactaccagtctcgccccatcagcgagctatgggacgagtgtgacctatgagctggcagatcgaaaccacgagccggttcgataaagaattcaaaaagctagaccgctacacccaaaaactcattcacggctggatcacgaaaaacatcgacaacaccgacgatccccgccgccacggcaagcccctcaccggtgatctttccggactgtggcgctaccgcatcggcgactaccgcctcatctgcacactcaacgataaccgcctcaccatcctcgccctgtccatcggtcaccgccgcgacatctaccgataagccgttgcaagactgcggcgtcgacaccgccgggaccctggcccaggccttgggcctggaggaggacgagagcgaggagcacgccgcctgagcggtcgccggcacttcccataacagcaccggtcccggcggcccggccccgcgtctggtgctcggaccgatgccggcgcctggcctccgacgcccgccggggccagcggctgggctacctcgacgtcgacgtacaacgggccgaacgaaccgtgcgctgatttaccaccgcttccgcacagagaacatgcctctgactaggagaaatgacgttttccacagggcctctattactaatatccctattatctctatccacgcgcgcgagcctcagcgttcaagcttcaggtcttgctcgtctccctcgcgcctcgctgcgctcgttgctactgccgccccacccggcaagccgggtgggttgccatcggaataccgtggaccatcccggcgcatacacccagacggtccaagatccaatccacgctcacccgcgacgccgctaacgatcctcatacaccgtagatgccgttctgagagccttccagacccgcacgtgggtttattgcaccgagacccaaatcccctcagaagcgatcctgaaaccgtctacgccccatttccgacggacgctggacaggctgggcggcttgtctcccgccgcagacatggccctggcatatgcggttgccgactggtgggatcagggattggatcacacggcagacggctggtccaaggcgggtgtgcaggtgcggtgagcggcagacgtgaccggtggggtgcactgtcatggccgggcatctgccgagccaccatgcgggccctggaccaggaggcagcccgctgcgaggactgggggaagacggcggcacggatgggccgtcgggatgcggcggccgaattcaccgagactgcggtgcagcatcgtggacagatgcaccacctcatgtcggcacaaaaagtgtgggtgtcgaccgacatggtgtcggctacactggacgccgcaggagacgtgccgagtttcgaggccgtcgacgtccctgccgccgggctcatgggtttggccagccccctgccgccggttaccctgcagcatccgctgtatctgcgcagcgacgagggtgtgacaaccttcactgatccggttctcgtcgacgcgctgggatggtggatggattctgggcgtgtgcacgtggtgatgtgcacacgcacaccccggctgcccaacccggtttatgcggtggcctccccactgacggtggtggagaaaatcacggtgcccaccggcatcgagttcgagaccatggagtccaggatcctgacccccggcggcgtgacaggcgtctcacggcagggcacacgcatgatgatccggttggcgtcatggctgggtgccgcgtgggtgctcatggcgactccgacggtgtcggagccgcaccctatggatggccggtggggaggcccagcaacggggcagacccggccgcgtgatcgggtgaccgtggtcgacatgcggcccatgaggcaggtgcacaccaccaccgaccccaccggcaggcggttgacgacccggcatgtcgtgcgaggacactggacacaccaaccctacggcccggcccgcagtctccgacgcctgcagtgggtcgccccattcatccgcggccccgaaggggctccgttcgtcggcaccgacaccgtcaccgtatggcgccgctagatacgcgggcgcggggggttgacgaacgatgcccccctctttgtgttgtgatcagtcgtgatcggcgggttttaggtcggggtaggtgtcgagaatggccttgaggacgaggtcttggattgtggtgtcattctgggctgccttgaccttcagtccaacgccgatgtcccgggggattctggtctgcaacttgaacaggtctgcctccttggttttgaacagtttggctgcagggttggcaacgggctgttcttggcgctggcgtccaaggttgcttttctttcgggcggtcatgacatcatctccaacagttcgtcggcaacatcggcgaagaaggcgatagtttccggctcaggggtacagccgtaggcgcgcttgatgacttgacgcttggggatgacgtgatcgaccaactgcgtctgggagtcgttggctagaaggtcgcgaccttccttgaacagggaggtattcggttcagctttggaaagcagcaccacgcgcggggttcctgcggcggcgtcgtgcgtctcccaggtgcgcgccatgtcgagcccggacgtgtcggtggggatgataaccagatcggcggcgcgaatggcggcggtgatgatgtcaccgttgcccggcggggtgtcaatgatgacaacttcttcgggtccggcgacgaggtgctggagcgtcgccttgttggccggttccacggggaaccccaaggggtcggcgttactcagtgtgcactcggcccaggatgatgctgacccttgagggtcggcatctttgacgcggaccatacggcccgtctcatggagagctgcagccagcaggatcgctgccgtggtcttaccgacgccacccttggcgttgataatgctccagatcatggtgacacctttcagtgaggatgcatatcagtttacctgcaaggagtaaagacggcaagcagttatgccgtttctgcggcaagccgtcttgcatccttggatgtatagatagttgtctacttatggttgtggatcgtggtgtctcgtaccaggatttagtgtgctcgctgatatgcacgactttcgggcggcctgatctggcggtggtgccactaacccaggagtctgatccgcaaggtgtcctcgactttgaggaaggggtctctgctttcgtgttgacctaaagtcaacggccctgggcgatcactgaatcctaataactttgtatccttccctgattgcatcttagcatccttgaattcaaacagggatggagccatgctgttttgacgacatggatgcactggggtttggttgttgccgatgcggagcgtcaggcggcccgggacgccgccaccgccgacacgctgcgggagatcgtgggactgctgggccggggcggcgaggtcccgcccgccaagacggggcgtaagacgaccggcaggccggccccggcccgcaagtcgtcggccacgcagtaaaggcagggatccgtccctacgcagagagcggaggcagatcctgggggatccgactcttcggttccgtgatcttcccggagatcttcccggatcccccagggctcatcctgatacggggtccgccgacggaccccgtatcagtgggggcgctgccaccagtgatggcgggcgggtcggtcggcgtctaggccccgcccgatggtcgcctggtctacctcgcaggcccgtgctgttgccgaggccgagaacgtctgcccacttgttgccgattcagtcccctctccgtctgccatgtcgccaacctttcctatctggcgtgctcatggacatgcccgggcacgccctcgctgctcagaggcctgctcgttccacctctggccgcgaaccgtatttctgctgaccactcctcgtgcgtgaatatttgccagccttggccattcatatttggactactctgcaccagatatcggactgggaaacctcttgcacatctctaattgtcatctattcgttgggcgcgcgctgttagatcgtgatcataccaatcagaagacaaagcgacgcccttttgagcggcttttcgaacgattctagaccgcgctatatcagcatttctaccgcgcggccagagtgctacactaaattcctctctgcaatccttaagtccattctttacttcctcatccaatttctgcgacagcatttttatggaagcatcgcactctgactcatcatcaaatgcctcaattgcgtgcgttcgccattcacggcgcgtattatcgtagccgtaatgaagtattacccaccgatccacagaatcatcgttaggatctacaactgtcatgaatggcccaactctcgctctggtgtattctcaattgcagttcagtgactttacttgaccagtcccggatttagtagacgtagacggagagtaccccgccgggaacttgactgacatcactgctgtaccgtactgctttcccgggtggcaaccatcgtaagcagcatttgccgtgacgtacctagtgctctttctctgagtgccggtaatcgccttatatggtacaggtgggtgaatcgtagccgttacggctaccgatgacacgtttgcatcacatgaagctgtggcgacataattagttgtcccattgacatgatgagagtcgtggacatactgtcgaggatcgagagtgcaggttattgttgacgccgttgttctggtaccagctgctttcgagctctttgttgcagttacagtctgcggccctgaaggttttactgacgcgactgatgtgttcgcgtgttttgcggcagtgctttgatttggttgtgcttgtgtagcagttgctgatgtcgccagtgatgcccccattaccatagctgtgattatggcgtagtctttacgcttcattgcgcccccaaataagcatgttagtttgctattttgaataggaaacgagacatcgccatgacttgtcaagggcagaagtagaaagaatcggggggtatcaagaaagatgtgctttcatcaggacgaaagcggatgggtccgttcgacttggtgacgaatgatccggccttgcgtcgcggagaccaggccggcgagtttgtcgagcagggccgccgtggcctcatcgtcgggcacatcactaaagggacgaacaaccatgacggctagggccagaaacgaccggaactgaatcgcatgtggacccccatctggcaccaggcacacacctaccgaccggaaaccctgcaccctgtcgctcccagttcacctcctaatatgcgcctatagtctgtgctagtagacattattttgtgtgttgtttcccatctggcatgtctggccccggacccgccgcgacacgcggtggtggataacagaccaggacccccggaccatagagaccagggggacgagacagtcccccggtgaggatgtctcgatgtgcagatcaggaacagaatcgccgggcacgacccggcgccggtgccggtgcagtgaacccgtggcccatcgactccacgaacgaacgtctcgccttcctcaactggtgttggcggcaaggctactcagcagccatcgtggaaacgatggacgccgcgggagcctacgaccacctcgacgacgaccagaccagcaaccagcacgactaacgccgctcccagcacgggggaaggcggcgcaccaggtgcgccgccttcccccgtgctggtgtctcgtcggcttactggtgggggtcgtaggggaacccgtaggtgtgttccagggccttgcggagaaggtcgttcatagttgtgtgttcggcgacggccttcatcttcagcgccgtgtgggtggcggtgggtagcttgacgttgaacgcggtgatcggggtcttggccgactggaaggtttcagagacactggctccctggctggccgccatttggtcggcgtaacggctggctttgtcggcggcggtgggtttgcggttcttactcacttcagcatctccttgattcggtcggcaacctgggcgaactctcctagatctgttggccgggttccgatggcttgccgataggcgacccgtcgatgaacctccgcatcgagaacgtctaggccctcaacggcggcggccccctcgtgggcatcacggtattgcctggtccaatcggctttgttgaagagcagggcccggcgtgtgccgtgggccacctggtaggtcattagcgctcggtccatgtccaggtcccccgactcggtcgggatgatgaccacatcggcgatgtcgagggctgcggtgatcgtctgagagtcaccggggggagtgtcgatgatgacaaggtcggcgtcgatgtcacggcagcgcctgacgataggggcattagccgggcggacctcgaagcccagcgggtcaccagtctcgaaagcgtcggtagcccatgacgtcgccgatccttgcgggtcggcgtcaagcaagatgactcggtactgagctgctaaggccgttgccaggtagaccgccgtggtcgttttcccgaccccgcccttggtgttgacaatagaaatactacgcataaatacatcattacacatgtgcatcgatgtatctgtatatatgtgtatcggcgtgttgtgagggaaaacccgggccacatacaacgatcccccagccaccacagccgggggatctctcagtaaagccagcaactcccacagaagttgcacccccacgatacccaccacatccgtgtcaagcccccacaacacccaccagcgccctaggcttcccccatgaacattgacatggacacaccaaccgaaaccgaagccgacaccttcgatgccgtcctcgccgacattaaccacatcaaccgcctcaccgccgacgaaatcgagtgctactccatgggagcctgtctcctcctcctcaaccaccaccccttctccgaactccgccaacactgggccgacaaccccaccgacgaaaccacgtggaccctctacggggccatcatcgccgcctccaccctggacccccacctcagcatcgacgccctagcccgcctctaccagctccccctcgacctcgtgacccaagccctcaccgtctaagcgtcgatgagcgggggagaggtagcgcactatcggctaaggaaccccacaaacaccaaacccttgtcactgggaagggtttggtgttatgctggtctcacaactcaacagaggaggtgagacatgggaaatgagtaccagaagtcgctcaaagtcctgttcaagaaactggaatctgagcaaggagcccgcatcgagacccggcgcaaaggatggatgatctacccgccggatacgtcacgatcagcggtcatgatccacaagactccatcagatcgcagagcatgggccaacatgctttccgaactgagacgctcaggattcaccgtctaactcagtgaagggggctggagctccagccccctttcaaccacctcccccggacaccacacaagaaaaggagaacatgatgtggcacgttcggttgtcgcttcgcgcaatcagcgaggacatgctgttcgacgccctggacaccctcgaccccttatccccggtggccacactgggccccgatgagcacaccggatcattggcggtgttcgtcgaggctgactcactgacagacgccatcgagactgcccgcacagccatcaccaacgcatgcaacaccgccaccataaccggcgtagaagcccgccccgaagacgaatgcttcgcagacgttgaccggcccctgttcccgccagtggtcggatacaccgaaatcgctgaaaccgcaggactctcacgtcagcgcatccgccagctcgcaggcaccgccgggttccccgcacctgtcatcaagaccgcggccggcccgctgtttcccaaagccgccgccgagcagtgggcgcggacacgccagcctaaggcaggccgcccaaaactccagaccaccacctcataacacatcccgtgtgctgaacctgttggccggcccagcacacacccccaggggccgggcccagcccggccccgccccacacccaaccgccccctgttgccgccgtggcgaaacgatcaggcgagccacgaccatcgccaagctgaatggagagcgagcatgagcaccacccctgccgggttcgacttcgacgctctggccgagtgggccgagagcgatgaggcgacccacaccccgcaaaccagccccgtgttccggggcaaggacgccgcgcgcgccagccgcgcattcctcggccgaggacggcccaccctcggctcagaccacgccaccggcgagggccggtcgccccgccgtcaggtacggctcgacgcacgcaccaacgcgcgactcgacgcctacgcagccgcaaccggcaccagcgcctcccagatcatccgcgacgccctcgctgactacctgcccgcctgatcccaccccaatccactcgggcgcctgtcagtgccccctcttctgggtggtggtccggggcgtcaccgccccggaccagttgggtagtcatctcagttgaaataagcgattagtgatacgcccctcatgctttccggtgctgtcatgagcgtctgacaacagcgacacctcggggcagccgacggacagtcctctggctgccgctctgatcccatgcccacggcacgaaggtgtcggacagctcggtctcgtcatgtgcccaaatagcgtcgtgggcctgtcgccaagcttctcgggagccccacacgggcacgaccgggccacaccggtgtcctggtctccagtgtcgcgacactgtcgatttcggtacgtgcaatgcggcggcggtttgacggatcgacatcccagactcccgcgcgtcccagatcgccatgtggagagtatttgcctccagtgcggccgccacacttgcacgctctcgcgcacgctcgaatgcccgcctagtgctctcaaatgtcgtcacgacgcctccccctgaaaatactcagggtgtcccacggtgggacaccctgagtatttcataccccaactcgcctcaccacacgtcgacctcgacaccgatcaagcgacccgtatcagcgacattgccgtaccgctgccccgcctggtcctccagccacgacaacgcatcccgaaacagcccgacgtcttccaaagctaaaccacagtcgtagccgcccttgtcccccaaccgcacaatctggcgctcccggtggcctccctcgtcgacctcgatccacagtttcgcgtgcatccgctggcctcggccctctgacaggatctcggtgagcaggtcggacgcctgccctcgcgcatcctcgttactgcgggggaattggagtatgtgggaggaacggtggtggggcaggtttgtgacctcgtgacgcagcaggttgcgcttgtgcatctgccgttcgagacgctcgggctgacctgttgacggggttgagccgtggcgccgcttcctcggcggggtctcgatccgttgctcttccggcggttcggcgtcaggttgtggtgcgcgatctcccctaggacgggggggctcgccacctatatccgagggacgatgagacggccttccacgcttgctgcgcactttcgcagcccgccccttgcggtcacatcgacgcggcggcggagtgacgtcctcaccgcgcgctaactgcgtcaacgccgccaccaggttggtgcccggtttcagccctttcagcacgaaccgcaccaggcgggggtctcggccgattcgtcgggcaatctcggcttggctccacccttcggctaacagggtgcgcaacaagtcttgggcccggttatcacgctcagtcactggtcgcctcctcggggagtcctgcctgctcggcctgctctgatagagcagcccgttccgatccggtctggggcgctttcaggggaccgggtaggacacctttgacacgcagtcgcccgtccttgccgtcgtcgccgcccccctgggccacagggagcgcccaggggggcacgttgctggtgtagatggcgtcgccgtggatagccagcagggtgcgggagttcatgcgtagtgctcctcccttggttgtggcgttttttccggtggtggggtcggcgatgggtgtgttgagggtgcgtacgcgggacagggcccagatacgggcggcgatttcggggtgccaggtgtcggggtcggggcggcggcgggcggtttggtattggtaggcgatggtgtcaccggttttgttgcggatgacgtcgaagccttcgatgtcggaggggatgtcgtcggcgtcgtagacgacggtggtggtgacggggttggaggccgacatttggccgatggtcacgcgcagcatgtttttcaacgcggaggtgaggattgtcgtggcggtggggttcttgtctgcccagcgtttctcggcgatgtcgatcatgtcttggatggttttgacccatcctcggatgggatcgactttggtcagtttgatccctccaaggaactcgatgggcttagtaacgggcccgtcaggaccgaattcggtgtcccagccttcgtcgatggctagtttcagttcggcggcgtcaacccatgtttcgtgggtggtgccgggcacgttgggccaaaaccatcctgctcgtcctttggtgcgtttgaccggtagtaggccgatgtcgtcccaccaggatggcacggtgaagcggatgtggtagcgggccgggtgccaggggttgttggtgaacaggtcgtgagcttcggtggcgctgagcagagtggcgggtgcggcaccgatctctccggtcactgatccggcatacatgaatcggccgtcgatgtacacgaagttagggatagggccggcaggcacggtggggcgccaaccttgttcgcggtcctcggggttgccgtcgtcgacgcatagttcgtagcggtgctgaggggaggtgtgttggatgagtgcgcccagttcggggtccatcggctccatgcgataggactcgggggtccgtagcttccagaggttgattccttctgctccggggcggtccatgagggcccagtcgcggtcgattctggtggcgatgatgtgggttaattcgcgccatgcccagcgggcctggattggggtgagggtctggccagggaaccattcatcagcgaccagaatgtcgaggttgcggtcggtttctttgtgggtgaaccggcctcgggcgggccgcccggacagcatgaacaggccccgcacgtgccagtcctggttgaactcgcgggtgtgagcgggggtgtcaggcagcagccaggattgaggctggtcggggatgttaccgcagacgatcaggcgtcgggcgttgtggtgtagcgcggttgttagcaggtctgacagggtcgcgtgcttggtgcgccgcccccctagcactggcaggatctcgtttccggccgcgtcgactccccgggcggtgtcgatgtctagccacactgtttcggggtcggggggccgatgtggggcgggacggcgctgctcctggtcgtctctcatggtttcctcctttgggccagggagcggccggcgtcgagggcgttcatgcgctcgcgttgttcttcgcgtagttggtagacccggcctcgtgacactcctgctgcctcggcgatggtggtggccggcaggtggccgatggcggcagcgtcggcaaggacgtcacgccaggccaggtcaatggttcccagctgggctagagcttcgtcgcggcggcgggtggcatcagccactacggaggcccaccctgtggggtggatggtcttgacgacgattcggttgtggcggatggggccccatgcatcagcggggacttgccagccgtgattggcggcggactcggtgatcttgaggcgtcgctcaggtgcgcgggtgcgggcagtgacgtcggtgttccaggtctggactggtacccacgtcccctctcggatgcgttcgatgacgcacgtggtgacctcgtcggtgactgtgatgaccagacgataatctttcccgtctggggtggttcggtagctgggcatgtcaccctcccctatctgtcaaatgagctagacacagtgtctatttaatttgacgcaaagtcaagtgcattagacgcctttgtgtggatccgccccaccagacaaacactcgcgcctcatgacccgccgcgaagccttaacgaaaccaaaccgcttatagaaccgctccgcagcgctccccgagggctttagctccaaggtaagaccttgctcgtcggcccattggcagacttgtgtgaggatctgtgagccgtagccctgatttcggggggcggcatgcacgcacatcagcatgtgaccatgacggcgggtcggcgggctgacataagccccaccacgccagtccggtgtgatctgccaacttcgccatgccgcagcgcgccagcggcgggcctcggtagccaccatgatcaccatgatgatggacagggttacgacgccgactatggtcagctcactccagccaggccagttcccggagatgatccagcctcccagcgcccagatgatcatggcttccacgcccgccgcaatcgggacgagtggggcagtacggatgcggcctgccatgatctcggtgatctcgctgcgatgccatgacaaggagaattcccacgactcttgaatcatgctgatgtgtgaacggcttcctcggcttcgccctgccatagcttctctagacggcgctcggctagctcgtcggggcacggcgacagcctgccgcactcggagcagaccccgaagtggcgcgagagagtgatgaccggctcatcgggagcatgaaccgattcaacgaccgggtgctgctcatcggtgagtcctgaggcgtgaccaatctcggctagacggaggtgaaccataccgtcgtagtagtcgaggccttcaacgtggaacgggtaggagccgtccgcggtgtggcctgcaaccaggtccccgacttccagctgactggcggtcatggttcgcaccggcggcagcggggtccgggtcgcgttgatcctcatggtctctccttgcttctgcgccttcatagatgaaggtgccacagccggggttgatgtgcggaaccacagccactttttcaataaatccatcaccacggtctcaccccttcccaaatgtgtaaaccgtggtttacgctttaaggcatgatcgaacacacaccgacacccgccgcgcctcgcgtggccatcatttcccctagcgggccaccacggttcttggccgagcctcccagcgccgcgctgcgacgccatggtcggacccgcatgaggtcccttcccctatcccctcacattcgcgcctgggtctccaccagcggccgtaaacccaatcccatagccaccgccctgatctggatgcataccggagccctgctgccggtgtgggacaccgccgttttgactgggcctgccctcggcagacgtgtgcgccctctcagcagtgacgccgaactgacctctcggcggtggctcgaccaggttgccgaccatcccggctttctcgacacccttatcgaggccgcccgcatcaccgatggatggcatcacgcgacgcctccgcacattcaggccccttaccggacccttcatcagtgaacggaggtacaacgacatgaccagcgacattgacattgaccggacccacaaacccgacgaccgcgccgaggctcctctttaccggtcctgggccaggagactcgtgcacgtctccgggatgccctggcgtatcgtcgccgccttggccggggtctcccccacctccatgcaccggcttctattcggccgcaacggtcgacccgtggaatggatcggcatcaatgatgctcgcgccctgatggatatcggcatcgatgatctcgcctcagcgtccaccgaccgtatcccggcccgcgaatcccgcgagctgttggtagccctgcacaccctcggctggaccgatgagcatctaagccgctggctgaccagttccgacctcgacctgaccaccgcccccaaagccctctacgtcactcgactatccgccgcccgcatccaggccacctacgacatgctcatcagccagcccgtccgccgctgcggccacccccgcaccccgcccgtctcgtccccgacccctgctgtcctaccccagcccagacccaacaacaccgaaccgttccaacccgccctgttcgagctggccgactgcgcatgaggaccctgcacagacgtgattaaatcgaagggctcaaccagtcatcaggagtcccccgtgcgtttgtaccgcgctgttctcgccgacaccgacatccatatcaccatccgtatctggaacactaccgatcgtgactggacctgggccccccttgacacttgggcccccgacccggccccgaccacaccagcccagttagccgatgaacttcaccgtcacggatggatcacccctgaggtccctactaccctcaccgaggtggctgtcatccccgagaactggcaagctttcgtcgagcatgccctcgctgtccggaaccagcaggctgaccaattgcgcgtcgccgagaacatcctcaccgacatcctcggcgacgccgccgacgccggcctgtctgtcaccgctctcgcccgcacgaccggactatcccgagtcgccgtctacaaacgcagcgccaaaaccatcgactccatgagacacgccacccaggccggcggaatcctcaccccctcctgtctcacccacgctgagagaacagcgctcggcctgcccgacgagtaacccatcgtttacatcctcgactggtccctgcgaccagtgaaccgtgcccccactgcgcccacaatgatcagcacacccacggcgatcatcaggtgggcagcactaactgatcccaacgaaccaagatcaaacaagccctgcccgggagcgtcgagcagtccgtgggcgcgaagccatgctccgagattgccaatgatcttggggatcatcttgttcagtagggctatccctccgatgccgacaacgaggaagacgaggatttcttcgcctgcgttgtttcttcctgtgtttgcggtcatgctgccttctcggggtggatggccagccagctgatgaggttgtcggtgatctgccctgagatttggatcagttcgacttgcccggcctgccatgcccgcgatgtgccggccagcaatgatgctgggacccctactgcgcggccacgggatgcaacctcagccaaggcggcgcgtaactcctcgacggtgctttcgatgtaccaactgccgtcagtactagtctcagcggcatcggtggtagcgataagagcatcggtgaggtcgtcgacggcgcggtccagatcagcgatgtccggtagggctacaggagtcatggtgtgtcttccttctagggtgccttcactggtgaagggtccctagccccggccgatgtgcggtgctgtgggaaaaatgcttcccattggtccgtcttagttaggaaacttggcctaagtgctgtcgagggtcgcgtgttcgtgaccggttcgaagacactgccgccttgtcttcttgcccgtggcgcttccgagatggtcagtgggcgatggctaggccgatgagggcgccgctgcacaggctgggcgcccagggaaggaatcgggtggtgtggtgtcggaaccggtcgattagggcatatagggcgatcagggtgaggccggctatgacagtgacctggatcgtgtcgatgccggttgctgcggccggggctgcccacagtggtgtgatgcgcacatcagagaaaccgaatccgcctcgggagatgagccaggcgatcatccacgctgcgaagatgatggcggtagcgatgacagcacgtatcgccgcagtatggtccgagagggcggtaacgactacagccccgatccatccggcccatccggtccacgctaggactgccggtatccatgtggtgatggcgtcaatgacggcaacccatgccccgatggtggctagcagagcccaggccggccaggtgggtgctggggcccacgctacggcggcgatcatggttgtcgcagatgcagcacagacagcgatcaagcttcggaggctgtaggtgtcgcggtagacgatcttgtcgggattggcggtagctggttctggcaggacgcgggtgagggcaggccatcctgcgaccgcaatagccgcgacggcgaccacccacacaatctgttgcatgggtctcatcatggcccatcatcgatgagtatgggtggccgacatggggtcactcgtagaggggatcgaggggtgtgcgggcgagcatggcttcctgtgtgccgagcatgagggtgccagaatcctcgccagccgattcccagtcgacgatgacctggtcgccgtcaacgctggattcggcgatggtcacccattctccgtcgatattgatgagcaccccagcggccagctccgtggcagcaaccgggtgaggtgggttgtagaagcggtcgatgtcgcaggcagggtcgtcgggttcctcgactaccggaggtggggtcgatctggctgtctcggtgtcgtcggccaggtcggctcccaggatgcgctcccattcggggctggttttcttgcccgctgaggccatcgtctcgtcgatctgttcgtcagtgggccacacaaatttctttttggtccaggtcgtggtgtcgggtcgcagctgatccagcagttccaggtcttgcggggagtgggccttgcgggggtcgggggtgtagaagaattggacttccttgggggctgattcgccggataggtaggtgccgcggccgcgtttgccgaacgggatgcccacgccgacgtgttcggagccgaacatcatgcgggctccgtcagcggacaggggtccggtggcggcacgcccggagaagttgtctcggatttcgccgcccaggaactcggcgtcggggcgttgggtccccagatcgacgtggatacggcaggcggctgccatgcgcagcagggagccgatccagccgaaaacggggcattctccgggcatcccagagaccttgatcgttgaccaccagtttttcgcgttgccgtagaactggcggtactcgtcgatgaggaccagcacgcgggtgaagtcggtctcgcgggccccttcttcttcgatgcggcggtagcggtcctccatgagagaccacagccagtggatgagggcgacctggtcggggacggtagtggcgaccatctcgatgttgggccactcccgcaggcccaggtactcgatgcgtttagggtcgatgacgaagacgcgccagttgcggcgggcaccctcgacggcgtcgccgatcatggacaccgtttttccggtacgggtgcggccggccttgagctggtgggccatgacaccggagatgtcccagaaacaggtgttgccgtcctcgtcgacggcctgggggattttctcccagtctggggagtctgggcccggaagggccacgggtcggggcaccatcgagggcagggggtggcggcgggtgacggtgatggtgtcgtgttccaggtcgaagtcgctgcgccactggccgagcatcatcgccgaggtcaccgcggccaggcgcaattggatgttcgggctggacaaatgggcgccacgttggtggtgaatggtgaagccgtccaggttcccccgatcggttttccaggaatcgacggtgaccgccgacccatagatctgagtggctacttctttagcccgttccttgtctcggtccagatcggttttgtcagggtcaggggtcggggcgcggtattgcaggacgaaccggccggccgggatcgttgcggatgtcaccgtgaactctgccggcgaccaggcagccgcggccgcctgggtgagggccattggcatggtctcgacggcagcctcctcgggggggatggtgagggtcaggcgtcgcggatgcgtcttcttgcgattccatgtgactttctgcctcaccggcaccttcgccgccgactgaatggctaggcgagctgattcggcagtttcggtacgccggccagcgcgtagcgcccgtcgtgcgtgaaggctgcccaccacagcacagcccatacacggcagccacgagcgcggatcagcggctgctgcatagcccccggtagctagtaccgcacctgaccagccggccgcgatacttttccacgccggtttcgcgccaccaggaccagcgttatggacggtctgcttcgaggctgcggagggacgagacagcggagtgctggtcatgccgcggcctccttgtggcaggtcatttcacaggcatgccggccagcgatgatgccgtggcgcaccgccccggtagccgcatagaccgcgcacaactcaaacacggggcacccatcgcaggccgccgggttcatgctttctttgtcccacgatggtgggtcatcggtgcacggcacggccaggccatcctgttgagcggcgctgatagcggtgaataggcgcagctgggcgcgaacttggtctggggtcaggttgacggtgcgggctacacgcatggggttccttcctcttcaccagtgaaggttccctagacccggccgatgtgcggagggatttcagtgttttatcgaggtgaccagccagccggtctgcgctgcgggttcaggtaccagggtcagatgcagcatggtgtggtcggctaggggcacggcgaccaggggcccgtcggcgctcgccccggtgagggtgggagttccggccacggtggtggcgggaatctggttgggtttcgcggccatcagggagcccatgagggtcggggcggcgatctggacgagggcgactttgcgggcggcgggatcgcgggtcaaccagccgcgggtgaaggtgagcgcagccgacgtgatatcggggctcagcggggctggtgtggcggcggggtgggccgttgaggagggccatacgcgcggtagcgctggcgacatcgagcgggtcggagtggggtcaggtgtggggcttagggtccgatgtggcgatggggctaccgccccggtggtgggagacgagactggttgggggtggtgttgagggcgtgggatcagggtgaaggcagccaaactggccgggatgaggatgacggccgcgccgacacttcggagcgaggtcatgtgacgatccttcggtagctcgacgggttgccgtagatcttttccacgttgatgccactatgtgggttgtcggcgctaaccatttggcctccaccgatgtagacggccacgtggtgggcagggcttccccagaggatgaggtcgccgactttgagctggtcacgggccaccgcggtgccgactttctgctggtcggcggcggtgcggggaaggctaatgccgatacgccggtacagcgccgaggtcaggcctgagcagtcgtagccgccatcggctttgccgttgccaccccacacgtaggcgtaggagttgttgtcggcgatcgatttggcccatgccacggcttcggccaggttcttcgacacaccggtctcgttagcggccccggtggcacagttgtttgacaggtgccctgtagtagtggatcccactatttgtttggccatggtttcccatttggcgtaggcatcgggcagggctgagccttgcactgcctgagctgcctgcgtcagcggcatcttctgccagtcagcgatgtcgactaaaccgggaatgtggaatccagggccgccggccgatccggggccagcgtaggtgatggtgtggcctttcaagaacgcctcggtggcgtaggcatcattgttgacctgatccagagtcccgtaccagcccggcaggatgcgctgctgaaaggggccggcgtcaccgtcaccgttagccttcgctgaggtagggtcggccccaagatctgattcttgtttggcggtcataatagcgatgaccgctgcctgggtaggcagtttgtcacgctggaccacagtgacgatggtggtcacgagctgcttctgcctggccgtgaggcctccggcacccacagtgcctccggtgacggtacccacgcaagcatccccgccgacactgccaccgccgacgccagagttgtcgtcgagggccccagagcctactgacagcagcggcacaatgatcacggtcgcgggcaagaccgccaggcccgccagcatcagcactgctgcactcaccacggcgatcacgtgagatgctttcaacgctgcccacctttcgctggtttgagggggcgacgcctgctggtacgcacaggcttggttggtccagtccgccgttggttggcaggcctgggtttgatcggcttgctgggacccggtttgggctccggagtcttaggctccggcttcacatgcctaggcacttcggctgcggtgggaggagtcagcacgtggcgtaccggcttggtgaccttctgggcacccgaaacaaccggcttagacaccaccttggcacctttgaccaccggtgcggctgccttcgcgccggccttcttgactgcacgatgcgctttgatagccccggcctcggcccggccaaccctgctagcagtagcatcgagggctctgtggcccgtcgttgccctcaccggtgcatccttgccctggcgggtctgcttagcgatcgccgacatgccgcctcgcaatgccgaaacatgattgtgggcgtgggcgatcgccgacatgccggccgtcgcgatttttgactggccctgcggggcccctgccccagcacgaatctgctggtaagccgccgacgtgccacgagcacccgccgccattcgcgccaccttcgcagccctagtcactcccgtcgacacgccacccgtggctaccgcagcagcacccgagaccacagtcgaggccatccgccttcgacccaatccggtgagcttgcgaccaccgctgcgcaccatccggcgagcaccccgcccagcccactggccgatcaccgagcccctttcggaacgcttgctgcgcatccaatcgttgatcttgtccctcagccccttctcgcccttgtgacgacgccacatggacatcaagaacccgataatccccacgagctcgagcatgttgacaaccatgaccttgatggcgacatcaccgtcagaggcgaaaaccgacttgatgatgagcatgaccacacccaacatcaccatcgacccgacaatgccgatcatcgagtacaagatcgaacacagatcccggatgagcggatctgtgcggccagggatagcccgcaacacgttgagcatcgacatgaacgccgaccacaccaacttgcacacgtagaaccagcacatgcccgcgaacaccagcaggaccacagccaaacccgccaccgtcgacgagtaaaagaagaaccccaccaaccacgaaccatccgcaatatcgccggcgtaatccgacaacccctcatcacagtcaccaaggtcgtcgcgagcatccgagacgtcatcgtaagggccacccttgagcacctcgatgtacttgtcgtggcacttcgcatcaataatgcggccatagttgagctgctgatgaaccggcgccacgaacgagtccacaatgatcgccgacagcttcggatccttcgagtctcccgtcgaggtcatgtcatcaggaatctcgacctcaccagcggtcgccgtcgcaggatcaaccgaactggtaatcatatgagacagcgccacaccgaactgctgggtgcgagccagcggagtagccaacgtcgtcgtatcgcctgcgaacttcgccaccggggccgccaagaaacccaacgccagcgccgcagcaatcgccgcacgcgcacccgtagcccacgcccctgccgtacgtcccctcatcatcttgacgaccacgcccacaccggcgcacgtcgtcagcaacgtcaacaccgttccaccccagctgtccgctcccagcggggccaaaaccttgtcgtggatgtcgttctgtaaccccaccagcggtccggtaatccacccgacccagctcatcgccacggtccagtccaacaaccggcacaacagggcaatgaccatcaggtacgtgttccaacacatgccaataatggaggcccacatagccttcagcggggccgtaacgccaccatcgtccatcgacatctggtactgaaacaagtgaataccgttggagtcagtcacattgaaaccgtcacccatccagcccagccccgggcccgatgccatggcaggcacactgctcagcgccaccaccagaaccagcgtggtgacgatgatacggaaccgccgctccccggccccggggcggcgtggatgacggctcacgctgtctcctggtcgtgctcgggcgggttggagctggcggcttcgcggtggggagcgtaggcaggtctcagtagtcgaatttcaccgacgttgccgtgttggtcggcgtacaggccacaaccggggcctccggggttgagggcaatcttgaccaggtcagcgaactcttcaggggacgttttagggtccacgcccaggaactcgacacctttctgggcgaggttgatgttgtcgcacagcaacacgatgcgatgctgaatgaggttgcggacggtctcgttggggtaatcggcctcggggtcgtgggagccggtgataagccaggcattggctcggcgggattcgcgcacgtactcgtcaatggcgtgggaggcttccggcgaggacgacatgtgatgaaactcgtcaacaatgaaagcggcgtcgcgggcccggtcgctgaagcacaccaggcgagccagacgggcaatgagcgcgtagagggctcggccaaacaccttgtgcgggggcagctgccgaaacagatgttctgacagcatctcctcggcgttaggaagagcgatgccacaagtgccaatgatgaggatgtcggcactcaggtcggcgggaggaaggtccgggtcaaagatggccgaagctagggaggccgagttctcgatgtcagcgaacacggcaatcctgtcagcgatcgcggtggcctcgggaaggtcgcactcctcggccaggtggcgggccaaacgcccacacgaggtgatctggtggtcacgcatgtaggccggtttgaggaccttggccagcgtggtcccggccacaccgatggtctccaagttaagcaaggtcagcaagaacgactgggcgacctgcccggccatctccgggggaaggatgcgcagcgggtccagcgacagcttggggtgggccgtgtcgacgatctggcgtctaaccccgtcgatagagttgacaaaggttacccactcccgctcatcggagttgtcggtggcaataatgcgcccgccccgggccgcgatggctgcgcacagccgcttctcggccatcgtcttgcccgcgcccatcttgccgatgaacgccaccgtgttgcctttctgatcctgagtgtcggcatgcaaatcgaggtaggccagcgactgcaacggggagcctgtgaccacagccaacgggatgccggtggtacggcccaaccggtactcaaccaccgggatagatgcggcgaacgcggaggcgtgagtcagctgacggtaggcgttaagcgaggaggagaaccggccaccgggccgggcagcccacagcaagtcctcctgacggcccacgggacgcacccacgtgaagtcaccgaacaccggatcattgacgaacgctcctgccagctcctcggtggtctcaaagtcaggagacgagacagtgacggtgataagagcctggatctcgacctcacgctcatcggcggccagctcggcgttgtagtcgacgagcacctgagcggaatgctcgatagacatgagggtcgaagcctgggtcatctcaccgccctcgacgttgtcgagctgatcgaccgtttgacggatagcccgctgatttttctgcatcgcagcgtgacgggtccgggccactccccggatcgccacgtcgaccggcacgccagtgtcgtcgatacggcccaaaaactcgtaggcaggccacgtcatcgtgcggggcaccttacccagcacgatatgggactggtagacggtctcgccggtgtcggcaccgattttgaggacgcgacgattccacgcctgagccgtccgggacatgtgggagactcgcttgtcatcctcgctggccagcaggtcggaggtcgcggcctcatcgatgaccaactcccccagcgcggcacgtccaacctcatccatgagggcgattccctcgccaggggcatcatcacgcaaccgggtcgggtggcctgacaggtgctgccgaagccagatctgttcatcaacggtgaccgggcggggttggaacgctgccggcagtttcgcaccgaattccttagcctgacggagggcccactcccgtgcgacacggccaggagcggtggtcatgagtccggcggcttcggtgattttgttgagggcggcggtccaggcggtgtgggtgcgtattttctggtcttggttgagtttgatcgataggaaccacacgcgccggcctagggattcggtttcaggctggtcgagggtggcgtcgatttcgtcggcccacacggggtgttcgctcaggtcaaggccggcggccatggcgtcgacgatttctgtggggtcggtccaggtgagggctccgttgaggcagaactcgtggcgggcgaggtggcggaataggtcgcggtgagctgcggcgacggtgagggaggcgttctcggtgacgggtcgctggaggggagtgagtcgccaggtggcccagatgtcgccggtggaggtccagacgaggttgtcgaagaggaaccgttcggggatggacatcatgactccttttcggcggcggcgaggaaggcttccaggccgctgcggcgtacagcgttcccggtagggtgcaggggttttctgggggtgggttcagatttcgaatgtgggaggggtttgtggatggtatcggtgtcctcggcgagggcttggtcgagcaggcaggtggccggggtgtcggtagtctcgtccagctcgtcgatcatctcgtcgaggaggttgggggtggtggatgcggcccacacaggtgggatagccggtgcgggtcgaggcggtgtggggaggcggagtttggtttggccccagaggggtgtgtgggtcatgccggcgggagtggtggcggcgtgagtggtcacacgccaccagcccgccagccatgccagaggtgaccaggtccagtcgatgcgaccaacaacgaactgggcgagccatccggcagccagcgcgaaaatgaaaccgcggatggtcatgcccccgtcgataattttgaagcccatcatcgcggcaggaactacgccgccgacagcgagcacctgatagatcgtgtagggcccgccaggaatccttcgacctgaggaatccttaccgataatgcggggctgctggcgggcctcggtgtgccactgaatatccacgatcagctcttgcccaatccttgcatcatctgtccgaagaattggatcgcgttaccttcgataagccagtgcgccataccacacacaaacagcatggagacgatcttggccaggctcataccgtgtttgaagatgttgaacgcggcaatgcccacgactacgaccatggcgacggctcgcaccgcggactgaccttcacctgccttgatcgtcgtccattcgaagaggttctgcgattccagtggcagcaggaggaattgatcgagcatgagaggttttcctttcaggaagccgaccgggatggtcccggtactgacgggctggacggcacgggtgtgccggccaggggcagaaggcgtgacggctggtcgagggaggcaacctcccagcggcctgcacggctgacaagagtcaggccgtactggctggtccgggtagtggattcgtcgccggtgggctggcatgtcacggtcaccgtgacggtaatcttctgccggtctgagggggtggggacctcgtcaggtcccaccacatgagtggttttcactgatacgcatggggctgggtcaaccgcggtgaaagcggtccctgggctgctccatctcgacaggtcggtattcccggtcagcatggcggttaggaagcctgaagaggcttgggcggccgggtcggcggtgcgaagctccgaggtgtctagggtgggggctgaggccggtgcaggcatggggatctgtccaggtagacgcaaggcgatggccttgccgttggaatcgacgtggaccgggactgaccaggcctgtccgctcccggattggccgcccatggtgaccacggtgacctgccacaggctcggatcagacggggagacggtagcgtcataggcggtgacggtggtgggcgctggaccaggtttgcggggcatgcgcgcatcggtgatcttggccgccaccaggtgttccagattgtccaagtgcccggagtcagaggtcagcagaagagtagtcacctcgaccgcggtggctgaggcgatctgagctgtgcggcggtcgtgatgggtggtgtcagtgctgacagctgtggtgggagcggatgccggggccgccgaacggaccagggcaacggggccgcatgcgactccgcacagcacgagggcaaggaagcctttggtggccatcgatccggtgtggggccagggacccacgttttcctgtgcctgttttttcttggccgaccaacggcgggacttagggttagcggatgcaccttctggggtgcatgctcgtctcaatcgcatcggtcacctccttcactggatgaagggaccaaggaggtgaccgatgtgcggtcgaacccgaaaaagttcaaacttttttctgggtctgcctcaagtacgacagaaggcctgcatcatcacggcgttgtggtagcagatcttgcgtcagcgcaaatgtatgggcctcgtaggagtagctcttaggtgggtcccggtggttgcggccagggcgagggtgtcgggtatgtgtagcgctagtcccgggttcgtggtgtgagggcttttgggtgctgacatgcactacccattgctagacgctgtgctgtggcatggctggacgtctagcagacgggttgacatcacctttaggctggcagcgcccgaggccgcaggccagaggaagcggacagcctaacgattgacgtccccctctcctttccccaacctcctggagtcgatgacccggagatagatcgatgtctatgcatctgtgcatcgatatacctatgtatctgtctgtggtttttagaggccactcccgtcgccccgggccgctcagcgataccgcaaggctgtgtgggatcagctgtgccgctctcccgacatggcagacagcaccctgcggactgactgacactgtggcgccgcggaggtctcccgcggcgtccgctggggcgagtgcatgcctgtcagctcatcttttatcgtcatgtttccccttgtcagagcggtctttgcaaagtgacaacgtcaggggtcttgacgacaacatcctcgacaacatcgtggcggtggtctgtgtctcgtcagttcaacgcaccggggaaagaggcaccgctgatgttcaccaccacaaacaccctcaacgatgagtgggaccagattcgcgccactgagatcgattggcatgactgccctgaactgatgcactgcatcgacgttgatgatgtgttggccgtcattcctgccgcccccgacgccatcttgggctacctcattgcccgggctcagggcggtgacgagttggccacccgcactatcatccaagcgttcacaggcaagcttatcttgatggccacggccaccaaggtgcgccgtactaatgacggcttcaatgatctgttggcgggtctgtgggagacgatcatcacgtacccgttggatcgtcgccctgacaagatcgctgcgaacctcatcctcgacacgttgcaccgggttacccggttctggcgtgctgattcccccgatgaggaagaggctcacggtctggtgcccttccctgacactctcatcgccccagagcccgatgaggacgtcacagctagccaggccatcgccttggcggtggaccgcaactggattaccgaggacctagcccgcctcatgagccatatttactgtgacggtatgactggagctgatgcgggtcgtctgcatggctgcgctccagctacggtgcgatctcgatgccgtgatggtcgggccgtgttgcagcgcaacgccgagacgatcctggccgtctgctgatccctctcttgctcatgcctgccgccaccctacccctacctgctagaaacatagccatgtctccagcaacgcatctagcgtatcttctagcaattgatctagctatgtatatagctgatgatctagctaccatatagctgtgtctccagcccaaaggacagcccaatggcatgcttgccacaggaaggtgcgtcagcctcccgaaatactggaaggagctttaccgtgcaggacatgacctcgaccagaccgattgaccgatccccgttcgaccgcactattgcggtgtggaaccacaaaggcggcacgttcaagacgtccgtcgtggcgaacctgggatacctgttcgccgccggtggcaacaaggtgctgctggtcgacatggacccccaggccaatctcgacattgacttcggtatacccgcgggagaacgtgaacggggcatgggattagccgaggcgctacgtgaggggacggcccttcccccaccgcagcatctcagcgaaaaccttcacctggtcagtggcggcgctgctctcaacgagttcaccgaccccgcatccttagcggccatcctcgaccgagtcaccaccgcacgctacgacctgctagctcaggcccttgccccgctggcctgggactatgacctcatcttcatcgactccgggccggcacaaactctgctgtcccagaccatccttggagtagcccgctggctggtagtgcccacccgcaccgataacgcctcaatcactggcctcgtcgacgttcaagacgccatcgacggggttgcctcctgcaaccctgaccttcaactactcggcgttgtcctagccggcgtgggggcccgggccacccggatcgccgcagataaacgccacgccatcgacacagtgctgggggcaggaaccgttttcgatgcggtcatccactactccgagaaggtgtccgtgctcgcacgccagcagggcaagaccgtcgccgagctagccaacgagtaccacaacacccagcccgcctacacctacctagctaaaggccagaacatccccaacgtcgccaaggcagccgtcagcatcgaaactgattatctgaggctggccaccgagatcagcgaccgcatgttcaccagcgacgagcaggagcctgatcatgactgacgatccgactccatccgagcagaacaaccccaccagcgacgacatgcgcttggccgaagaatgggccaacagcggccgcacagtgggagccctgccgcgccgtcaacggcctcagcgacccacaccccgcaccaccagccaaccccctgtctcgtcccctgacacaccggctccgaaaaaaccccagaagacccccaccagccagcctggccgtcaacggatcaacgtcaccgtctacgttgtgcccgaactccatgagcggctgcgctcccgatcggcggcgacgggggtgacggtctcggatctggtggtgcatgcgttagcgttcgtcgccgatcatgcgggggaggcgatcgccgatgatctgcgcgtcgagacgggccccggcatgggggccggactgttcgatgtgaccccatcgcggccagtaggggtcgccaaaacccagctgggggtgcgaatgacccgccacaacaaggatggtttggaccagctgacccggacgagtggagcccgtgaccgcagccatcttgtgtctgtcgccgtgcgcgactatctcgactccaaccctgtaaagaaaggccgacatgtccgctgatgaaactcctgccgcccggggtgggcgacgctttgatacgaccgtcaagcccaggcgccgtcccatgcttatcgccgccggtatcgccatcgtgatagtcggcgcgctcctcatcactcagttgattcgctccgcccaaaccgagcatcgcgtgctggaagtccacgccgatgtggctcgcggcgaggtcatccgtgacaccgatctggtatcggtgactgtcggccaggtcgacaacgtatcaacggttcccgcagaccagctcgactcactggtcggcaaacgcgccacggcagatcttcgagccggatcactcttgcctgctggggctatcggcccggccgatgtcgttccagctccgggcaagtcgctggtcgggctgaagctagccgccggacagatccctatcggagaccttgctgtcgggacgaagctgcgcctgatccagacgtcggcacccagcggctcatccaccaccactgatagcagcaccaataccgatggccagtcgtgggaggcaacaatggcgaccggcaccaaaaagaccgagcaggtcaccttgatcaacgccgaagtgaactcgcgtgatgccgcccggatcgcccaactgacgtcacagggccgtatcgccgtagtgaaggatccgatccgatgagcaccattgttttgaccagcgtctcgggagccccaggggtcaccacgacagcgatcgggctgggcagggtctggccacaatcgagcctggtcgtcgaggatgacacccaccacgccatgctggcgggctacctgcgagcctcccagcacgccgaaccgaacctggccgcagtggcgaacctgacgtcgactccaaccaacgcccaaacggtgtgggaatctatcgccagacccctacccaccgatgacccagtcggcgggctgcgacgcaaaggcatcctcggcccgcccacgccgtggtctcgcgcaggcatcgacccccgatggggattcatgctggccctgtggcggcaactggaggaggctggcatcgacaccatcatcgatttgggtcgcctagccacaccactgacctcaacgccacacctgatcgccgcacccatcgtcgaggacgccgacatgatcttggtgatgatcgaggcgacactacgcgacatcgccggcgcccgcacgatggtggagggactcgctgagcagatgaacttggccggcgcctaccgacgtctcggactgcttgtccaccgtggcggccaggcccgcggcgtcgccgagttcaatgacaaggagatcacctcggcgttacgactcccggtcatcggggccattacccacgacccggccggagccgcccaactctccgacggggtcgggcagcggttcgacaagtcacgtctggcccactcactatcaaaggtggcggccagcctcgtcgatgccataaacaagcgccacgctgatgacgaggaggatctgtgatggccagttttgctgataatccgttcgacaagctgcgctcccaggatgcggcaagagcttcggtagagcaggagcctgatgccggattagcgtcggagttgttttcgacgtcgtcggggtgggccagctctcagcaggtgtcccaagctcaaccggtgatgacccgttcggagaacgtggattggccggttgtcgcggagctagccagtacggccactgatgaggttgaggctgagatcagcaggtggagttccactcatgatggggtggcgacgctagacattcgccaggccatcgcggagcctgctattgcctcggcggtgtctacgtatgctgaccgacgccagatcgatgtaggggagacctggcctgatctggtacgccagcgataccgcaaggctgtgtgggatcagctgttcgggatggggcggttgcagccgctgttcgaaatcagcgacgccgaaaacatcatcgtggtgggtaaccatgaggtggttgtcgaccacaacgatggttcccggtcaacgctgccgccggtggccgactcggatgccgagctggaatcccagatcgcccggatggcgaggaatgcgaccccgcggcgagccttcgacgccgatcacaccgatgtgacgatcatgcaccaacagaagttccgtatccacgcgatctcttcggaggtgtcgttgcaaccgtcggtggtcatccgccaacatttgctcacccaaatcagtctgggggacctgtcccagcggggaatgatgccggtggaagtggcccggttcctcgatgaggcggtacaagctggcaagtccatcgtggtcgccggcgagcagggggcaggcaagacgacgtttttacgagcgttgatccacgccattccgatgcgggagcggttcgccacgttggagaccgatcaggagttgttcgctcatctgatgcctggccgggaaaacacgctggtgctgttcgcccgtgatggtaacggcgaggtggatccggcgactggcacccagcacggcgctatcgagatcgcccagctgattcctcctagcctgcgccaggcgttaactagggtcattgtcggtgaggtgcgcggcaatgaggcttcggccatgttccaggctatgcagtcggggactggcactatgagcagtatccactccccgcgagcctctgaggtgccgtcccggctagcccaaatgatttcgatgggcccggtctacgatctggatcaggccatgctgcagatcggtcattcgatcgactacatcgtctttgttcgtaagcgtgacctgcctgatgggagccggctgcgatttgttgagcagatccgttcagtctcgcctggtgattcgacaactcccagtcttggcgaggtgtacacggctgactcgtggacaggccagccgcttacgccactcatgcctggttcggccgccgacgagctgtctcacttcgcccgagacctggattactgcgaggcccactgatgaacaccccagcgctgatagcagccctcatcgtgaccggcctgggactgatcatggccatcaacggcctgatcccggccacacccaaacccggcaccacgctgacgctgtcacagcggtgggcccgggccacccaccgcccagccggggcagccgggcgccgacgcgacctgcgctgggcgctggccggtctcgtcggcatcgtgctgttcgtcctcacaggttgggtcgctgccctggccctgggccccatcaccgtgctgctagcacccaccctgctgggggcggccccaccgaccgatattccgctgatggaggcgttggatcggtgggtgcgtcaggtcgctgcggtgctgccacaggggcgagacatcatcacagcggtgcggatctcacggccgcgggccccgaagctgatcgccgggtcggtggatcaactggtgtcccggttggatggccgtatggagccgagggaggcgttccagcggatggccgacgagctggactcggctgaggctgacgcggtgctggcctcactagcgttggcggccactcatccgcggggagcctcgacaacgttgaaggctattgctggcaacatccaacagcggttgaaagtgctgcggcaggtggaggctgagcggtctaagccgcgtaactcggtgcgccagatcacactggtcacgatcgccatgttcggggggctgctcgtgatcggacggtcgtttctggccccgctggcgacccctcccggtcaggtgctggtggccgtggcggtggtcatgtatgtcatcgcactagtgcagatgtatcggatggcgcggccccgtcgacgcacccggatcatggtcaggaggacccgatgaccattactgctttgtccctgctggccggggccatcgtcactgtcggactgctggtcatcgtggcagcgttccgcccagccccaggccctgacctggttgccgctctggaggtggtgtcgggtcgcacctcaagcgtcgccgagaacgtcgaccagacccggatcgggcggataggtcgcagcgtgacccgcacattccatgtgtcggtgtccccggccatgcgggccgcactgcgactccaaggcacgacccccgaagcgttctacggtcgacgcctgatctgcgcactgatcggggcgatcctgccgtggctgctcaacgcggtagccatcgcggtaggggcgaattccccgaacctactcatcccttcggcgctgtgtgtggcgttagctggcgctggatggatgctgccggcagcacggttgaaggctgcggccgggcccaccaacgatgactcgttcgaagcgctgctggtattcatcgatttggtcgtgctggaacggctcgccaacgaaacctccgtcgacgcgctcaccaatgcggcaaacatgtcggactcgccgctattcgtccagatccgtcaagtcctcaaccgtgcctccctggaaaacgtcgacccgtggaacgggctagaccggctagccgaggacatcaaactgcccgaactcaccgatgtggtctccatcgcccgcctccaaaacgaaggcgcctccctcgtcgacagtttccgggcccgagtcgccgagttgcgcgacgcctacctgctgcgcctgcaacaagaatccaccgccatcacccagcggcttggtttgtggacgatcctgcaagccggctcggtcatgctcatcttgctgggggcggccgccctcacactcatcacagccggataaaccgacatcgtgtcgagcccccatatgggccgcgaacctttcataatgatgcctgtaagcaccacaatattgatcacaacctaacaatgaaggagaaatcatgatgaccgatctcgacctggctaaaaaacagatcacctggctggcggcgcacctgcgttcccggatcgttgacgagcgtggcggtggtagctctaccgtggagacactgatttggattggtgtcatcgtggcgctggtgattggtgtgggcgtcggggtgacggcctatatcaggtcgaagatgcctcactgacgacgatgcgtagcaggttcacaactgatcagcgtggcggtggtagcgcgtcggtggggatgctcctgctgatgcctgcgatcatgctgctggcattcggtgggatcgaggtcgggatgtggtgtcacgcccatcagtcgaccatcgcggcagcccaaagcgccgcggaggctcagcgtgtcgtccatccggtcccggggtcggcacaggaggcagcctcgcagatcactagtcatggcggggtgcgtgatacccggatatcggtcagtgatgacggggccactgtcacggtgaccgtctcaggtcgggccccatcgatgctggggctgcatcttccggctgtgtcgtcgacagcgtcgatgcccaaggagcgcctgtcgtgaggcgaagtgagcgcggtggagcaagtctaagcgtcgaggtgctcatgtgggcgccgatcgcgctggtgatcatcgggtttgttgtgggtatcggccggatgtcgatggcccaggacgcggtgaatggcgcggcgggtgctgcggcccgtgcggcgtcgttggagcgtgatggacagtcggctcagtctgcggcgcagcaggcggcgtcggcgaacctgtcgtccggtgggctggcatgtgcgccgaatgtgagcgtggacacgtcagtgtttgcccgtcctgccgggcaggcgggcacggttcacgccacggtcacgtgtgtcacctcgctgggtcttgggttcgggtcccggacggtgcacgcaacggggtctgccccggtagacacctatcgggaaaggagaggctgagatggcccgtgatgagcgtggtggcggctcggtgtcggtgtggatgctgctcatggtgccggtgattctggtcatggccggcctggtttttgacgggtcccgtcagatatcggcaacccaggcggcccaggacgcggcggttgcggcatcccgcgccggaactgatgcggcagcgacaccgcagcttgctggccacgacggggcggccgtagcagtccaagcggcccgccaggcactatctgctgccggggtggacgggtcggtgcaggaggacgggtcgaccatcacggtgaccacgtctcaaagtcggccgacagtgttcctgtcagcgatcggaatcagccaggtaagggggcatgggcaggcccatgctcagcttgtgggaccgggagaacgcccatgacagtgatacgtcgtatcggtgccctggtggcactgctggtggtgatagccggcttaccggccgggctcgtggccgcaggcgccccgctagtaccggcgggcctgtcatgggcccatgtgcggcatctgttggttaccccagacatgaccgggtcggtgctggtgtggctggtcagcctcatcggctggatcgggtgggcatggttcgccctggccgtcgcagccgaagcggtgacgatgctctcagggcagcggctgcactggcacatgcccggccctcgcctagtgcgccgagtggcagccggtcttctcattgccgcgttcgcggccgcaccggcagccacaagcacggctcacgccgccgaggccacccatgtggcggtcgccgcccaggctggaccggcacacgcggcccccgcccaggacagccccgccaccacctctcaggccccggacgcctccaccactccgaaaatctggaagacctacacggtgcgggccaacgactacctgtggaagatcgccgagcactactacggtgacggcgcccaattccgtcgtatcgccgaagcctccggtatcgacccgcactcagagctgaaagtcggccagaaactgatcctgccggttcctaagaacacggccgcagttcattcggttaaagcgggggagtatctgtgggagatcgccgagcactactacggtgacggcgcccagtaccataaaatcgctgaagcttccggtatcgatgcccattccgatctagccgtgggccaaaaactcgtcatccccgggcccctccgccacgacgccacgccgccacaccactcggcgtcgacccacgcgaaggccgccaccccagcccacacgcccacgcgacggcctgcgcctgcccacaaagccacgcccgccccgacgccggccaccccaactactccgacccacacggtgaccccagctccggcctctgccggccactcgaccagcgacgagcacccactccatacggataccgccgcagcggacaaggccagcaacgaggacgccctgtccccaatccaggtgggtttgaccgccagcgtcggactggtgctggtcgccggactgatcaccaccctcaaccgccgctaccggacccggttcacccgccagccccgcggcaaggccatgaccctgcccagcccggacgcccaaactgccgagatagcgctgcgcagcaccggggcgactgacactctgacgatcacctgcctcgaccaggcgctccgcgcgatcggcgcatggtgccaccactgcgggcacccgctgccacccctgctggccgcccgcgtcgatgacgaccggatcgacctgctgctatcccaggcggcccccgaccatcccgaggcggtggagctggccgccgacggatcggtgtggaccctcaccgccgaccggatcgacgacctgctagcccacaccgatgacaaccaagcggctccgtggccgtctctggtcacactgggacgcgacgacgacggcgcccacatcctcatcgacttggaagccgcaggaaccttgcacctgatcgccgatgacgaccaggtcgacgcggccctcgccgcgatcgccgtggaactggccacctgcgactggtccgacgaagtcaacgtcaccctcgtcggccaggtgtgcccgggcctagaagacgcactagagtctccgaccctgacccgcgccaccgacgtggacaccctcctcaccaccctagaagctcgcgccgacgaccagcgacacatcctcaccgaaggaaaccccctcgccgctcaccgagccgaccccgccatctccgacgggttcgacgccgaagtgatcctcctcgacaccgaactcaccgaagaccaccgcaaccgcctcgccagcctcgtcgaggctcttccccgcgtgtcagtcgccgcggtaacaaccagccccaccagctcagacgaatggtccctcaccctgacaggtgacccactagccgccgacctggctcccctcggctggcacatccacccccaaaccctctcccccgacctgtacaaccgcatggttgaactactcgccaactccgccgccgcagactacgaacccgccagctggtggaaccacgacgccgacgacgagcccaccaccgaccccaccaacgaggaagaatctaccccgagcaggcgagcccgcccgaatatccgcctgaccaccctgaccggcggcatcgacctatccagcgtcgacatcgacgacatcatcgacgaagccaaccaggccctcgacaacaccgaccagaccaccaaccaggttcgcgtcgacaccaaccaacccggcaccgacacccccttccccatcgacgacatcgacccgctgagctccgaccatccggtcctatccatcatcggccaccccgacatcacaggtgccactggaaccgttgggcgctccccgtggcgctgccaacagttggctctctacatcgctgagcatccgggagcatcgggggcgactatcgccgatgatttggggctatcagcgtcgacggtgcgctcgattgctacacacctgcgacactggttgggagccgacgatgccggggtggcttacatgccggcggcgacgcgcggctaccggctcgatgagcggatcgtcacagatgtggacctgatcgacgctgctgtggccggggcaggcattaacaccgctgagacggccacactggtggccattttgaagctgggccgcggacgggtcttcgctggggttcctgactcggaacttcgccagttcagggcgtcgatgtaccacgtggaggcccgcatcgtcgatgctgccctccaagtgacagaccgggccctggaagccggggacctggggctggcccggtgggcgttgacccaagggctactggtgtctcccgatcatgaggacctggtcaccggttgtctgcgcaccgagtaccaggccggcaacatggacaaggtttccgagctggtcgatcacctgtcggctaccgcacgacgcctgggcgtcgatttgagcgccgacaccacccggatcatcgactccgttattacccatacacgcaggagagcatcatgatctcccgttgcactcatctccgtcaggaaggttcctatgcaccattatcgtcttggtatcggcactgccctcatcgcggtagcagccgtggccggctgtcgctcaacagactcgacacccacaccacctccatcccgtgtctccgccacgacatcagcgagctctaccctcagcccgaccccgtcagccggagcgatcagtgccgccgacgccgaaaacatctaccgcaccgtccaagctaacaagatcgcactgtacaaaaagggtggcctggcacccggggaacccgcacccgcgacactgtcgaactacgccaccggccaggctctcaccgactacatgacctacatgcaccaaatctcggggcagggcatcaaaatcacatcggggaactcctcggttaccgcggtgcgggagaaaaagggtgataccacctaccccgaagccgctatcgccttggaatcgtgcgaagacgacagttcgattcgtaccgtggaccgccacggaaaggctgatcatggacgcattttccatgtcgacagttggtatgcccgcgataagaagggcaccgtcaagatgatcgcattcaactcaacggaggtccccacatgcgacgtcaagtaatcaccgcggccgtactgggcctggccctggccaccacctccctgcccgccctcgcaggcggcggcgacttgaacggcagtgtggacacggatggccctggttacgatgtgcgtactgaggtggattaccatcacaccaccggtggtgcgggtgggggtgccacgacagggggccatcatgggggcaaaacccacggtgatggtgaaggtgaggctattgatgggcgttctcgcgccgatgccgaagccgaactagacgaagccgaccgtaaccaggacttgacttgtgatgtcttgctcccaccggcgccgaataccccagccggccaggaatgggcgaaagaatgcaatcccccagcgaaaaaggggcagaaggccaccccgaagcccgatccggtgttagtgggccgtcacgcggccttgcagctcacccttcccggcgcggcccctcgtatcgatccgtcccccgaccttaaccggtggcactcggcagcagtgggccaggctttgtggttgtcggttgatgaccccaccgccactacgcagaaatcgatcacgtttatgggccaggttgtctcgttgagcgccaaacgtaacggtttgtcgtttgatatgggtgatggtcatgtcgtgcactgtgatgccacgacgacatggacggagtcggtggaaccggggaccccctcacccacgtgcggttacacctaccaacaggcagccccggccgggggctataaggtcaccgcaatcacgtcgtgggatgtgacctggtcggtactaggacacacgggcacagtccacatccagaaggccggtgggcagatgcttccggtcggcgagttggagtctgttgttacacggcgatgactcctgatagtccgacgctgtatgaggtgttggaggtctgccctgatgccactgatgaccagatcaagacggcgtggcgtcgtgccgcgaaagtgactcaccctgatgccggtggcactagtgaggcgttcgcggccgcccggcacgcctgggaggtgttgtctgatcctgcccggcgcaccgcctacgatgccgacctggcgggggaggatgatcccgacgacgaagccgccgacgccttcgacgttgatccgttcacggcatggccctggtgcgccccgtacatcgacgccacccccaccctgcgccacacctgccccggcacgatcaaggccatcgtggtcgccatcgccgggatcatggccggaatcggctggcaggaagcgctggaggccgtggtgtcgccgccggggtttctgggggcgtgctggatagtctcagtgccggttgtcgtcgcagtgacatggctggcagcggtgacgggtctggcatttttcaccatggcggccatctggtgtggatggtcgttgataggtggtgcgttgctgtggggccagacgtcggtggtgtggctgattgctgcggggtggctggcatggctggtgtgtgcgtgggtgtggtggaaccgtcatctggcgtggagtagcgagctgatgcaggaaggcaatttgtacggccttcccgaggaagacccgttgtggggcgaggccgtggagctggtagcgggacttatcccctctgtgcgggcgatgtggtcgcacgatgggcagaccgtgactgtgtcggctggccggcgggtggcgacactggggatgccgatgcggggatggcgtggtatcgagatgcgcggctggaatccagtgggcgccgatacgtggtggatcgttgaccaggtgggtagttggctggtcgatcaggatgagccgatggtcgttgacgggagggtgctccatgaggcgtgggaacggtcgcagatggtccgttcaggccgctgagaaaaaatttaggtccgccctgcatatcggggcctcttcataccttcaaaagtgtgaagggaatacagactcttcgactggaattaaaatggtatatggcgtgtccggtccgcacccagctccacgatgcgccataggggagccataacttcaccaatcgtatacgatatgagtgtaggtgagcatctaccggtggccgacagtcagatacaagcatgggcggatgaagcagaagctgattatgacctcagcatgcttccgccgtctcgacgtggtcgcccaccggtggggaggggcccgggcactgtggtccctgtgcgcttcgacgcggacactctcaaggcgttgtcacaacgagcccctgacgaaggattgaccacgcgttctgacgcgatccgtgctgcggttaaccagtggctcggcctcggctcgtaaacattatcggcgcgacaaccttactgatgacgctgttggttacgccgtagagcacatcttgtactcgtgggcgctcgacgatgctgatgatcctcgttgctggatgatgattcggtgttgacccagctggcctcctcatggagctagttatcctcatctacgacgatggctatgaactcctgatccacgccatgaaagcccgccctcagtatctgagctacttcgctatctagtgttgttgggcgagttgaactcaacttttctccgacgcaagcgccaataaaaggctgatccatccgaataccaccaaacacggctgacgtgtggaacagattcagcaagacagggtgcggtgctcgggtgcgttggggagatgaggatattcaggcttctggcgggatgtggcttgatgacgtccaggatcaccggttcggttttgaaggtgccttgcattaatgtcgacagggtcgtacgactcgaggactggatcgaccagcccgttgcgtctgaagaacttcatccaccccggtggagctccggccgcgtactggtgcaacggatcattagcatgggtagcgtgagtatgccttcgatcgtggtcagtgctgtcatcatccaaggttctgacgggcggcttctcactgtccgtaaacgaggcaccgaggcattcatgctgccaggcggcaagccggagcccggcgaggactcgcgtcaggcagtagtccgggaagtgcacgaagagctcggcgtcgcattgtcttccgacgacctgcgtcgggtgggagtgttcaccacgcgagcagcgaatgaggccggccatcaggtggtggcgacgattttcacccacaccccggttgcggtgagtgagccagctgctgagatcgagcagattcgttggctcgattggagtgtcgacgccctgcctgatgacctggccccgctgctggtcgaggcagtcatcccgtggctgcggcgccgtatccggtcggtcgctgtattcacgggtgcgaaggatggaaccgaccctcattatcgtgtcgaagcaaccgccttgggccggggtctcgcacacgccgggatcaccctggtttatggcggcgggaaggtcgggatgatgggtgctgttgctgatgcggccctcgctgctggcggcgctgtgatcggagtgatgccgcagcacttggtggacggggagatcgcccatcctagtctgactcacctcgaggtagtgcggactatgcatgagcgcaagcagcggatgagtgacctagctgacgcgttcgtcgcgctacccggcggcggcggaacccttgacgagctattcgaagcatggacatggcagcagctcggtgtacacagcaaacccgtggccttgtacgactcgaccttctgggcaccgctgaccgcgctactcaaccacatgaccatcgaaggcttcatccgccctgaggaccgcgcctcgctcgtgatcgccgataccatacatcagctgatggccgatcttgagggatggaccccaccaccaccgaagtggcgctcgtgacatagaacaaatgattctgactatggctcattgacatctgcgcagcggctactagctccattgacttcaaatcgggccttggccgaggctcggttcaggtggcccggaatggatccccacaaattgaatgctcatgatcgaggtgatgaacgcccactctattgtcctacgcccggttgtatccagcgagcaattgaaggtgctgcgcctgttggtcgaccaggccgagccactcatcatcgacgggcgcatcttgtacgaggcatgggacaggctgcaaacagcccgtccggcccgctagaaaaaatttttagggcccgctccgcacatcccggtctgtacccacaccttcaagggtgtgaagggaataaaaacacacctaacaacaactttgtttcatgatttggcgcgtcggaccctttctgaccgatgtcgtgcgcaacaatggacccatgagttcgcctaccaagatgcgccggaaggggacacgcggcccgaaacctcgcagcgacgaggagctaacggctgtgatgttccgcgtcccagagtcagtggccgaacgtgtcagcgatatggcttgggagctgaggctctcccgatccgatcttgtgggctggtcggccctctatgcactcaactcgatgctcagacagcgcggagaggacacgattccggttccggagtatctggacaaggccgtgctcgctgcgttgtatcccgatgggttgcccttcgacgaggacaccgaggagccgggcgagaatgccgggcaggaggagcttgcgatgactggatgagcccgaacatggttgaaggccgccccgccaggcgaccttcaatcaatggtttcggttgtcagctgcagccacccttgccaggtgctgtggttcttctccagaggaggagggaccgccatgaagacccagaagacctagaagatccaaaagaaccggtttcggctgttgcttcggtcttcatggtagctgatagcccgcgtcgttggaagtgcgacgacgccgatcctcatcggtatcgcaccctgttccagggtcgagaatgtgaaggattaacaaccatgacaagtcatgagacgccctcccggagggcgtcatgaccgctttaattcaagctctgccgacagctgaactgtctgctggacctggtgctagcagtccagctagaccctctgctgagggcttcatcaagattcaccacgacctcattagtgcgggcgtgtcgggtaacgcgatggcgttgttcgtcgcgttacgtaaccagcccggctgtgatcagtggacccgtcactcgtacctgcggctagcccaatggtgcggctgggatgggctgtcggaggcggcgggctgtaagcgggtgcagcgggccgctgctgagctcgctagcggtggttggctggaatcgcgggtcggccatgatcgtcgcaccgctaagacgctggtgtggcatcggttgaccagccccgacaccgaccgctgggagcaattgccgcggattgtgtgggcgaggatctgccagatcgccggggagacgtcgggagagtgggtgaggcattggctggtgtggcggatgctggccggtcgtactggtgtggctcaggcccctacgtccatcgtggcccggttcctgggctgttcttcgcgccaggtctctcatatccgtggggctctcgttgatgccggtctgctcggctgtgacgaggtctcgggggcggcgagccgggtgtggttcccctcgatggccgaggagtgtgcagcggatcgtgaggtggtcgatggggccgtcgtcgatgctgaggtgggctctggtgaaggtgtcgaggagggcggggaacccctgtcgattttgtccacccacccctgtcgattttgtccacccacccctgtcgattttgtccgccaagtattagacaaaccattagacagtgaattagaccctgggtcgcgtcagcgtgtgaactcaccaacgcgcgcgcgcgcggcggccgagccgccgaagccaaagaaacccataccaccaacgcctgaaccagcagcccccgcttcagacagtcctgtgtcagcgcacgctgatgaggctgccgagttggcgtggcagttcgtggggtggtgtcctcagctggtaggggcaccgaagaaggtgcgtggccagctccgccagatggtcgctgccgagatccgccggaatccgggctggctggatgcgccagcgttggaggttgttgcccagcgggtacgtgctgaaggtgcgctgggggtccagcactgtgagattgtgcgagccgagctgcacggggtgatcgccgaccagaaggccgcccccgcccgccccgacgccctgcacgcgcgggagcccaagtggtgggacgacgtgtactacgaaggaaacacaaccgtgtggtacgactctgacgaaaccagtgacgacgacgaggcgtggaaccggtcgcaggtatgtcatgttgctgagcgtgacgacatggctggcgggattgctaccaacctgctggcctcccacgctgatgatccgatggcctggctgactcgccgtcaaaccatgctgatggctcgtttcccccacgcccagaacgaggtcatcgcgatgtgccacatcgtgcgcaccgccctggaggccgacatggccgccggaacccggtgggaggactgatgagggtctcccggcgcgccctcatggccgtggcccgtgccgacgctgccgcagcagaccatgccaccggccgatgggtggccacagccaacgccaccgtcgcccggctgaccggactgtgcgaacgcaccgtccaatacgcccgcgccaccctggtccacctgggcctgtgccgcgtcgtggccaccggccgctacctcaccgccgacgagcggcgcacggctgctcgcacccatggcggccgccagatgcgcgccgcctccacccgcgtcctcaccatgtcctgcgcaatcgtttgcgccctaccccgaaggggtcaccactacaggaaagttaagttcctagatggtcaccaacgcacgcgcaggcgcgtgcgaaggccagcaacaccagagaagaaacccctgtggctgcaaaaactcgcagccctcctcgaccagcacctgccctggctggtgagaaaccatcacatcggccgactgtgccacgccctcaccgccctgggcatcgacgaacactggcaacccgcagacctcgacgccctcctcgacgccatgaaccgcaggaaccgtcgcctcggcctcgacgtgccatgcgccgacgaccagcacaaccccttgggactgttcatccatcaggcccgagacaccctcacccacgacaacccccatgaacgccgcctagcccgtgacgctgaacgcgcccggctcatcgacgaccaactccgccgccgcgcagaaaccgccacctgcgcagcccgcctcgcagccgagcacgccgaccccgactaccagacccgccgtcgtgaacgcagggaaaccctgcgagccacactcagggccgcccagcagcatgtcaggacacactgatacccgctcatacgcacaccatgaaacacgacaagccacctgacagtatcagctgcaagacgcatgacaacatagaaggacatgatgaaatacacatagacacaaccccgcacagcagtttcgcaacaaatcatgatagtctcatggcagtatcgcttgatacacacatagcatcactcccacataggcagttatgctgatatactcctactaggttatccgtccaacatgctgagtgggttcctgtacagcatgaaaggagcatggcatgatatgggccgttctcaactgcaagggtggtgtcggcaagacgaccagtgccctcctgctggcggcagccgccgccaagcagggccacaccaccctggtggccgacgctgacccccagggcaccgcatcccagtggtcagccctggcaaccaaaaacgacgaacccctgcccttcccggtgcaagcggtcaacatcgccaccatggaggcactgcccaccaccaccgacgcccatgatctcatcctcgttgacacacccccctcggcaggcgatctgatgttccaggcatgccgcatcgccgacctcatcatcatccccaccgccacctccggacccgacatctcccgaacatgggtcaccatggacgccacacaaggcacaccacgcgcgatcctcctcacccaaaccgaacacaaccgtgtcgtctaccgccaagctcgcactgccctcgccgccgacgacaccgtcgttctcctggaccacgacatcccccgccgtgaatccatccgcacagcatggggcaccaaccccccagacgacgtcatcacctactacctgcccgtcctcaacgaactcatggaggccctgtcatgaccaccaagaaaaccgacccattcgcccgccagaaagcagcagaagaccgcgcccaccaactccaagacgaagcccaacgccacgcccaccccaaacgcgtcatcggccccaccgcacgattccagttcgtcctgccagccgacgtgctcaccggcctcaaacacctcgccctcacccgcggcaccaccgcccgccaactcaccctcgacgccctcgacaccgcctacggcctcgacaccctcgccaacagcgggaagaaaacccacccatgacccgtgggtccccctgccaccaccccctcgacggcaactgtgtgcgagccacaggcccgcacacaggcggcagcccagtgccgtccccgccaggaaaggaactgaacttttctggagtgctggctccctatcaccccttatggtgctatcagatccagtagcgccagcccgagaggaaacccatgagctacatcgtccgcaccggaaatctagccggcacccccgagctgcgcgaggggtagccgacacggcggaccgtgcccctgacagtaagcggcactactggagacatcaccatgaccgctcagatcctcgccccgtgcaaccagaaggctgccgtcatcgaaggagccctgccatgaaccaacctaccccccacaaggccgacgagtcacagacgagcaacaccacgaggaagtggcggcacaaggtgtcgttctaccaagacccggccgacaccgaccgagtccgcggagcgatcctccacaccatgacaaccgaaggcaaccggaacctgagccagttcgtcaacgatgccgtcatggccaaggtgaccgaactggaagcaaaatacaaccacggcgagccattccccgccgtgggagcccgaggactcccccagggcggcgcagccgccaacagataagagggcggggaccaccaatagcagtcgatttcggatccagatcgggtagacaggacccatgatgaatttcatatcctccctgctctcggccatcctgaccctctttgcgatggtagccgtggcgataggagtggtgaacattgtgccgggaatatgcgccatcatcggtgcacggaaatacggcgaccaggaccgtgtgcgggcaggacaacgaaagatccttcttggtgctatcgccttggtggtagcagtaggcattcacccgtgacccacggttaccggaagccccgccgcaatcgataccactgtcagtaccatcaggggcgataggggtcaagctctccttgtcacaatcccttccccggcagcccagtaaccgtcgcttacagccatacatggatatgcgcccattcgtcggcaccgacgccgtgcgggttggcgacgctgacccgtctgctcacaaacgacccttccagcccagcaccacccactacaccgacacgatccacgaagctgaaaccgaacctcccatccccgtccgaaacatcaacgaactcatcaaccccaccaaccatgcatgaacgcacgatcgcctaccggccagccttcctgcgcgacgtgaagcggctcaaaaacaagcactacaacatgaacacacactcaaatgggcggtaaggtcacgaagtcgacgtggctgcctcacggatggcttcggcgagctcttggggtcgactccacatgggccagtggccggttggcagatccatcgcggtgaagttggtcaggtgcgcgacggcgctgaacatcggattgcctgctgcggccagctcgaggacctggacgctgggaatggagcagcagatcaacgtggttagtacatcatggcgagcgctattggacagcgcgacccgtgcccgggccacttgcgcgggttcaggaaccgcccgtgcccggaaccggtcaaggtgctcgttgctgaggccctctaaactggcctgcttgccgagagtatcgaagtcaggaagtggcagctcagctgtttcctcaggtagatctggtgcgaaggcacctccatcgctcatgggaccggagtccacccagacgatccgatggaccaactctgggtgcctgtctacaactaggctcaccggcccgttcgcgccactgtgtcccaccaggaccgcatcgccgcccatctcgtccaggatggctgagatggcgtcagcttggtcgtcgagcgtgcgcgtagtgcgctgggtgtcctccggatcgaggccaggcagcgtcagccccacggctcgactgccagcagtgttcaataactcgactacctcgtcccaagcccaggctccgagccagtaaccaggaacgaggacgataggccgatgctggtcaggtcgcgatgttgaagtcatggagacatagttgcacagtgcgcggacaagggagtggcactatttctggcatgaatttagatctgggtgtccggtgaggcgatcagaacgcctccatgtactgtccgagtgtctacgatgcagcggacacagtcgagcagctggctcacaagtttccaggtgtccttctgcccctatgagggaagtcggctgctctcgcaacctttgagggctgctctggggtcggaaccagttacagatcgttcaagttccgggaactaccgccggtcacgctgattgattcccgggcgatctcgcttctgacgacagtggtcggtaaccgagaggcgtcctactctgaccccgctgctgcggtgagtaaatcacgggcgtcccggatccggccacccgtccaagtgccagccagcttgatcggctaggcatcgtcaaggagcgacgatgaggtgatgatgcgatgtgagcgcaccgcgaagtgaggtataaagaagccttcccgggcgcatgcgtcgcccaggaaggccaggttggcccctggacggctgaatggttgggcggatcaggctgtagcggagacgtgcagtacctcgtaggcgatggcgttggttgggctctggtctgcatcgtggctactgagttcgacgaggatgacggtccaggtggtgatgtcgacggcggtgacgcgggcgatggtggaatcagtggatgctgcaaggaagtcggcggttatgtcttcgatgcagtgggacggagcagtgctggtgggcaggggcacggtcttgacggtcaggcttcgggcagcagagtaatcggcggttccgttaacaagctggtggacggtccagtcctggatcgggtgccggccgaagtcgcgtacgatagccgagtaaccaagttcgccccagcagaactggcgcatcccctctatgtcgcgccagacgtagaagggcgcgtaggagttctggggtgcgcctttgaccttttcttggatgaggtaggccttgaactccagtccatggtagccgtccatgaggtgtccagtctggatgacgcggtcgcggatgatctgcatgtcatagtcggtgggcagggtgatctgatattgcatggcgtacatcagcggttctccttggtttcgtgggagtaggtcgtggggatgacgggttcctgccaatcgatggttgacaagtcgtcggcggcttgttggtaggtaaggtggatcattggctgtttgagtgcagcgccatgccagtgtctctggccggcgtcgatccagatggattcgcccttggtcaggtgctggggtgcttgtccttcaatatggaccagggcaacgccgcccgtgacgtagaggccctgtcccttggggtgtgtgcctcagcggcaaacgtgacggcgtgggcggcacgcccggcgtcttccgtggcacgatcggccggatccatggcggcgcgcagctgctgttctgcagccaggcgtccaggtcacggcgggcagcatcgacacccagggcagcctcgacggcttcagggctacgacgctggccgggctggttgaccgcagaccactggtgccgggcgtcgtccagatcatggccggcggcgtcgatgagggcggtggtggcttcggcgcagcatcgcctgatccactccgaacgtgacaggccagctgtctcggcggcactgtcaatgcgcgccaggagagatttcatgggcgctcatctgtagcctccagataggcgttgatgtagcgcagagcctgatccgtcatgtcgatggcggctgcctcggcagacgacacaacgggctgtggatgataagaccacccaacatagacggcgaacatcaatttctcgacagctttcatgaggtccccggcggcaaccgcatccgcctcatcatccgaggagaaccacttcaggtctgaacggctgtacatagcccctaggtcctgatgtgggtcgaggtccttggaatgatggaagttcctacacacccatcgccaaagacctcaacatggacaacgctaccttcaccactccctcatctgtgaagagccagtttatgcacggtgttgaaagaggcgtcggtctacgacgaatgcgggttaatggtcttgcggtgtggggcgctgggcgatggcatcgagaacgcgtgagtgggtggcgatccattccgcgtcggggttgatgttgcgggcgacggtgtcgatcgctgttacgtagtgggcaagcctgcgaatctcagcttgttggtcagggtgatcgctgatgagaggctcttgatgggaggcgcggttacggacgtggcggatgagctccacgttttcctcgaagtcgcgtcggctacgccccgggtagtgaggcatacctccgttacgtaagtcagtgagagctttccatacggttgcttccaggcgcggggtgagcagaaagcgccagttgtccagtgacagactcgccacgatctggatcaggggtcgcatcgagtcctcgcgcgcccgcagtcgcttctcggccctggcgacgttacgcgggaaaccaccgagccgatagctcggggattcccaccaacgccgtatgccagtatcggcgctcaggcgcacgtcaatgaagtttctcaggagtacctcgacatggctgatgtcttccaagaacgctttcgagatgcgggtgttccacacgtaccacgcatcgactggttcgatccggtagcggctgagcctggcgggtgagaaccactcctgcaacgtctcacgactcaccgtgggagcgtggtaggattgatgacgataggcctcgggaaggtcaatgccgcgaaatatcggtatacccccgaggtcattgttttgcccaggcccctcctcgcatacttgcggggcgtcattggctgccgtcatctcgtctcttcccggtacgtggctgtccatgttcacgggcaggtacggcaatgaggttcccgcacacaaacctctaccaagcatacgctggcaagccccgacgagacgacgcctccgcccgccacaccaacggtcaccgccacggccacggtgaccgtgaccgtggcaccgaaacccaagccaaagcccaaggccaagccaaaggtaaaacccaaaccgaagcccaaggcccattcatgatcgcagtgcccgatacaaggtggagcggcccacaccaagctgggccgccaccttcgttttcgggacaccctcggcaacgaggcggcgagcgcgggcaagctggccctcgctcaatgccggtttccggcctcgatagcggccctgcttcttcgccaccgcgatcccctcggcctgtcgttcatggatcaacgcccgctcgaactcggccaaggcacccagcagatgcaacatgagctggctcaccggatcagcggaccccggcccatagacctgcccttcaagggcaggcccgttatgctgtcagcagatctgccagttgtgggtgctggtgtcgtagcagacgccggtgtcggtgtcgtcggtgcggttggtggcccagccggtggtggagtcgtcgagggtgatgtggtggaggtcgggttgagtgttgagccagtgagtcccctcggcttggggtaggccatcgaggatggctagtaggtgggagatggtggctgtgcgggtgagcgtgaggatggttttggatgtgttggtggtgtcgatggtgaagccgtagttggcgagtgcagcggtcacatcggtgggctggtcggtgtagatgcggttggtgagtacggagcagttggggccttcgccgtagatgctgatctccacgctggtgccgtggtagtgggcttcgtaggtttcgtcgatcatccatgttgtggcccagtcggcgtcgacgagggtgtagggggttcgggtagtgggaagtccgatgtagggcttggtcaccatgttgacgtgtgcggtgtacttcatcgttgattcctttcccgatctctcgttctgcttataaatatatagcccgatagacggactgtcaagagtactagataaataatctaatacgcttgacttgaaggatagttgagagaataactcacatgtgagatgctatcagcggcgcagaatgccccctccgggccccttgctgcccctttgggtggccaaggctgtaaaccgcagcgatacaggcttacaggtgccccgaaggggcgcctatccacgcgctcacccgacgccgaaggcgtcggca

SEQ ID NO: 32 - DNA, 26620 bp, Propionibacterium acnes
  source 1..26620: mol_type = genomic DNA
ccttgtggacaccacgtcatccacatgacttgtgtcacatgattcccggaccatcatcaagcagatgctcacccaactgtaatgatttctgttctgaatctggacatgctctgacctgcattcaatgatcaattccgtgcgatattccacaacgcacggggaggtcgcagacaatgacaacagaaagcatccccacgcggctgctcgtgtggcacgagcagaccgatccgaccaagctcctcaggatcaccgacgcgatcaggaggggggatccccttccccccatcgaggccatggcgatcggccacagattcctcgtcctcgacggtgcgcaccgggcccaagcccaccagtactgccatcgatctgagatccgagcccgcctccacaacctccccctcagcgcggaaataccaggctggagccactccataccccgcgatgcagcagcgaaactggctcacctactcctccccgtggacgctctcggtcaggcggaaatcgtcctgcacggggtgcgccgtcaggtggggaccgcttcacaacgaccgcgcgacatctttctcgcctgccaccggatcgcgcgagttgcctacgcgcatggaatcagacctctcggcccggagttctccaacgctccgacgatcgacgccgccaccatgacctggcgcccgccgaacgtgggcacgttgtgggccatcgccagcagtctcggacccctgcccgcaactgtgacccggttcgccccgatcctccggcacgacgccatcggggattccgcgatgacacccgtcacctccgccgcgtgacgacccgcgccaattccgccccaccactggatgaggggcagccgcgtggacgatgctcctgttcaggcagggactccatacgagaccaataggaaaatcatgatcaaaaacacaagccctctgaccgtgaaaaatgtctcgaaaacattccgtggctccagcggagaagccatcaaggccgtgcaagacgtgtcattcaccgttgagcgtggtgaggttgtggcattcctcggcccgaacggcgccgggaagtccaccaccatcgacatggctctcggcctcacccgccccgacagcggccagatcgaggtcttcggtactgacccgctcagcgcggcccggtcgggacgctgcaccgcgatgacacagaccggcgggttgctgcccgacctcacgattgggcagaccatggagatcatctcctcgctctatcgtggctcccacatgaatgcctgcatggagcgagcaaggatcacgcatctggccgatcggcaggtgtcgatgtgctcgggaggcgagcgccaacgacttcgcttcgcactggctctgctgcccgatcctgacttcctcatcctcgacgagcccactgcggggatggatgtggaggcgcgccgggacttctgggcagagatccacgaggacacgcgtcgtggtcggacaattctgttcgcaacgcactacctcgacgaggtggacgagttcgccgatcgggtcatcctcatcaaggagggccgcgtcatcgccgacgacacctccgacgcgatccgcaccatgtcggggggttgcaccgttacggcgaccattcccgacttctccctggcacgactgaatctgccgggcacccaactcatcaagcagggcggcgcacgcgttgatctgcaccatcccgattccgatgccctcgcagcgcgagtcatccagctcggcggcaccgacctgcgcgtggtcccccgcagcctcgacgacgccttcctcgctctcacctcaaccaccaaggagtcctgacatgaccgcccaagcgcttcccgcagtcgccactcccaaggcccgccaccgatccgccatctcgctgaagtacttgtggtgcgagatgcgtcgccccttccggcgttcgacgatgctgttcaacctcgccctccccgcagttctgtacctggccctgttccgcaccgtccacaccgccgagctgccggacgggaacttcgcgatgtggatgatgatcggcatcgctgtctacggagcggccactgcgagcaccagctacgcagcctccatctccgtcgacgaggccaacgggtggacccgcaccatccgcctgacgccgttgtcgtcggtcgggtacgtgctggtgaaggtcctctgcgccatggccatcgccctggccccgaccctgctcatcggtctcatcgggctgttgaccggagctcacggcacgctgcgggtctgggtaatcggactgggggcggcttggctcagctcagcaatcttctccgccttcggcctggctctcggactgtccctgcgtcccgaggtcgtcatgcacgtccccggcctggtcatcaccggtctggcgttcctgggcaacgtcttcgtccccctcagcgggacgatgctcaccattggccgctggagccccgcctacggcatcaccgcgctggctcgttacccgctcaccaacggcatcgacatcgggggcggccacgactccctgacggctgccctcatcggcaccttctgctggttcgccggattcgtgttctgggcctcccgtcgatttaccaagagcacgggtcgtcagtgacagattcggccgatctccggaaggagcagtgttatgaccaagcccctcattgcagtggtcaccgcgggccaaggagcgcagaagcctcgcctgctcacgccatggctcaaggtccccggcgtcacggagaagcttgctgcatggtccgctcaggccgatgtggacctcgtcgagctcggtaccagggcgaatgcagaaaccttggcagcgaccgagaatgcgcagccactactggtctgtctcggagtcctcgtctcggatctcctggccgaccagaacattgtgctcgcaggacactccgtgggcgagctgacagcagcgtgtctcgccggggtagttgatcccgggacggccgtcactcttgcacgacggcgtggactggccatggcgcgggcctgcgctctccacccgaccaccatggcggccatcattggtgacaatccggatgacgtcctccggcggctctcggaactgggactcacggctgccaacatcaacggaggcggacagattgttgcggccggctccaccgacgcgatcgcggaactggtggcgacccctcccaacgggaccgcagtcaagccgttgcgagttgctggcgcctttcacaccaagtacatgacgcctgcgcaggacgctttcgcccaagctgctcaagacgtcaccttctccgacccgcagcacccgatcatctccaacctcgacgggcaggagatccggtccggcaatgacctgcgtgaacggctgattgcccaggtgaccgcgccagttcgatgggatctctgcatccagcagatcgcggatcgtcagccggaactcgccctatcggcccctccggggaaggtgcaggcgtcgctcttgtctcggcagatcccggacctcgcgacggtctgcatcaccacaccacgggaggcagcccaggctgcacagcggatcgaccagtccgtatccgtccttcagggggcatgatgctcatccccgagtacttcctcacagcctgttcggaccatgctgagcgcctggcgatcatcacccacaatgacgttgtgacgtgggccgaactggcgactcgcgtcgacggttttcggcgctggctgcgggaccatggcgtgcaccgccaggacagggtcgttctccagacgccaagcaccgtaggcacggtagccctcatgtgggcctgcctgctcgacggcgtgacgatggtcccggtgcaccaggacctcactgcctcccaggtgcagcaagtcatcgacgactgccgtccagctctggtgtgtggcagcccggacctcgtccaactcctcaactcccccggaatgaagacaagcacacctccaacgcggccggagtcaacgagtattctgccgtccttgtcccgggtcagccccgatgaccttgcgatgctcatctatacgtccggcacgacgggtctcccgaaggggatcatgtgtccccaccggcaggtcgccaccgccgcacggatcgtccatgactgtctcgggtaccgcacggacgacgtcattctctgtcgcctgccgttgtccttcgactacgggctctatcagattctgatgtctgccatctccggtagcgcggttgtcctgcgggacggaggcgcgcaggaccgcaacctggtgcgcgacatcgcccgtcacggcgtcactgtcgttccagtcgtgccgtccatggcgtcaatgctcatcaccctgcagcgtcgtgatcagttgccgaccatcgtcagactgttcacgaataccggggcgcgtctggcacccgagaccgcgaaccagttgctcgcaagcttccccggctcccgctatgcgtcgatgtatggcatgacggagtgcaagcgcatctccatccttccggtggaggagtacgagacgcatccggacagcgtgggaagagctctgcccagcactcacgtcgagatcgttgacgctcagggagttccggttccggcgggcgagcacggggagatcacggtgtccggcccgaccgtgatgaacggctactggcaggtgccgaacagtcccagtggacgattccgacccagcggccacggcctcactctgttcaccggtgatcgcggctggatggatgaggagggacgtctctacctcctcgggcgcgacgacgagatcgtcaagcatcacggcatccgaatcagcctgcaggagatcgagatagccgccgaagccgcgccgggcgtcgacgcagtcatcgctctcaagccggcctccgactcggcccccattgaaatcgcctactgcggcagcacgagtcccgagaacctggcccgccatctcgaaaccgtcctggaccgggcgcgacgaccccaattcatccaccaactccagcagatccccctgacccgtaacgggaaaccaaaccggtcagcagccgccgaggccatccgctcaagggcgtgacggcgaaggccaacacccacagacgaaaggaaaccaccatgacccaggccgagttcaaccagttcatcgagtccacctgctccgcgacgatcgtggatcccgaccgtcctttggtcgatcagggcatcgactccctcggaatgctcaccctcatggtcgctatcgaggacagcctcggcatcgaactggatcccgagtccctcgccgacggtaggggttccacgccctccggtcttctgtcccttgtcgagcagccgaaagcgacggtgtgacgacatgacgacgatggttccttgccgccgtgtggagatgccgcaactgttcgaccacatccccggaagcatctctctctcaggagggctgcccgatctgagcgtgctcccgagcaatcagatcgccgaactgacgtcccggatcatgcgtctcggctcaagaatcctcctgcaatactccaccccttcggtctcgtcctccttggtgccggccatcctggacctggcggaacgaacatgcatgtcaccggatccgcggaatctgatcccgaccgcgggttcccaactgggcctggccatggtgatcaatgcctttgacggcgatgagatcatctgtgactgcgccacctatcccggggcgctggccgccttcgcctctgccggcgtggaaacaacgggggtggccagtgacgaggaggggctcaacccagacgcgctcgctcacgccgtcgcagagggtcgggccaatggccgccgcatcgcagccgtctacaccacgcccaccttccagaatcccaccggctccgtacagtccgagaaccgccgtgcggccctgctcaaggtgtgtgctgacaatgacctcctcctcatcgaggacgatccgtacggcatgctgtccttcgacgggcagacgtggccagctctgaagtccatggacccacagcgcgtcatctacctgggcaccttctcgaaggtgttcgcaccgggcgtccgttccggctggatcgatccgcccgccaatcttgtcgagaaactccgcgctgtgtgcgagatcatgacactctcgccatcagccctcaaccaagcgatcatcggcgagtaccaccgtcgtcacggatgggacgaactgttggagggctatcgcgcctcctaccgcgaccgagcccgtctcctcatcggggctctcgaggctgaactggcaagaacgaattgcactggcacgtggacctggcgtgaaccacggggcggcttctacctgtggttggagaacgtcgccagcaccagcggtatcgacgttgcgcgtcgcgccgccgacaacggagtggccgtggtgcccgggaaacacttcgacgcagccggacacgattcgccgagcctgcgggtgtcgttcagcaattcacgcccggctgatctggtcgaaggagctcgtcgtctcgcccgtgcactggtgggagaggacgttcagaaatgactctcgcgacacgcaccgccaccgacaccctgcagcagaccttgccctggggcacccacgaacgtctcgtcttcgggcgggcgctcctgcgcagcaccggcttcccagccgaaggcttggccctgctcgactccgacgacatcctccccctcctcgactcctttcttgccggggacatcgacagaactcacttcgagaaggaatacaccagtcgcgaggagtccggcgcaagggcgctcatcaacgtcttgaaggacgatgcagtatcgcgcgccatcgcatggcagaaccccaccgcgtggaggtccttcgaatccctgtcgtccacgagcggaatcaatgcttcgactcggcgcaaggtacgccaactcgccctctactggcaacgttactgttccaaggctgagaccattggatacttcggcccgttcgcctgggccgaagtcgacccggaggcctctgcggtcgaattcatctcctccgaccatctgatcgaccgttcccacgtcgcaatggaggcgtgggcggtcattgagatcgggaaagccctggcatcacgggccgaccttcagtggtggatgccaccaatcctgtcccccgccgtcgacctcaacatggagagaggcaccgtgacggtggctggacaccagccacgacgggtccgggaggacgaggcacgagttctcttcctgaccgacggcacccgtcccgccgcccagatcgccaagagcctcgacatggagcccgagcggttgcgcaggatcctcgtggcccatgaacgtcgtcacaccgtgatctgggacgccaacatccctgtctcagtgcacgcgtgggacatcctgcacgaacgcattgcccagatcggagacgctgggctgcgagatgaggccactgctgttctcacgaggttcgacgagcttctggaggtcatccgcaacattcccgacgcccggtccctgacggaggcgacggaatccctgtcccgtcttttcgaaaccgtgacaggaacctcttcgaacagacgtgcgggccaggcatatgcagcccgcagcctgtgctacctggactgcacccgcgccggaaccgccaaggttgggacccggcttctcgaagccctcgacgcccccctcaacctcgtcctacaatccgctgactggttcgcggcgaccttggcaaaggaatacaccaccgaaatcacggacctcgcaaatcgaaagcagcgggcctcccaccagccactgaccatggctgatgtctggccgtccacgatgtcgctgttctggggggactcaccgtccccactgcagcgagccgtgaccgaactgtcacggcggtggagcagagtcctcgaggggctgcagccagtcgacggtcgcatcgacacgacatcgtccgctctctcgggcgccgtggacgagcagttccccgtgtgcaccccgattccagaactgtcagtgcacagcccggacctccaggtcatcacctcgagcactagcaacatcgcctccggacgagtcactgcagtcatgggtgagctacatgcctgtctgagcagtctcgacatgccgttgctcgagtggtcgctgccccatggttccattcgcgatcgcatcaacaccgcgctcaacctgcgacgtctggttcccttgttccccgagacatggaggcgcaacaccggccgcatggttccagcgacggtcggagtgggggatcgcgcaatcgggttcactcggacggccgatcaagaccgtgcgaacacatggtcgatgtcggcactgctgttcgagcagaccgaggacggactcatgatccgtgatcccgatggcaggctctggaccatcgcacaagcgtggagcgtgcccatctccatggtcgccgccgatgcgttcaagatcgggctgcccggctcaccagcccctcggctcaccattgacaatctcgtcgtgttccgtcgtacctggaggtttcccgctggctccatcgacatcatgcacggttcagccgccgagaaacacgctcggctgagggagtggcaggtcacgaatcaccttcctgaccacctcttcgtcaagttcccctccgaacccaagccgatctacttctccttcgagtcccccgccatggccacggtcttcacgcgatcactgcagcgcgacgcccgagagaatccagacagtctcgtgacgatgtccgaagcactgcccgagcctcaatcctcatggctgcacgacacccggagccaccactacgtccacgaattccggctgcaactgaccaaggagcgacatgacgaccacagttgagacacatcccgaaacacgtggcacaaccgcgacatccatctccaatctgatcggtcacacccctctcgtaagaatggaccatctgttcgacggcctccccttcgaggtgtacggcaagctcgagaagctcaatcctggcggaagcatcaaggatcgagcagcacaatccatgatcgaacgggcaattcgacggggtgagatcgtcccgggccgtacgaccgtcatcgagtccagttcgggaaatctcggcatcgccgtggcgatactgtgccaggagcacggcctgaatttcatctgcgtaaccgatgccaaggccacgccaacgaacattcgactcatcgaagcgttcggggccactgttgaggtgatcgaagaacctcatcccgagagtggcgaattcctccccatgaggctcaagagggtaagagaactgctgtcagagattccagatgcatggtggccgaatcagtacgggaaccccgacaatccggcggctcacgagcggactgtccgcgagatcatcgaggcaatcccgcgggttgacacgattgtctgcgcgaccggctcgtgcggaacccttcgcggctgccacgaagcattgcgaaagctgtccccacgcacccgactcgtcgccgtggacgccaagggcagcgccatcttcgacgaggcaggagcaccccatccccgctgtgtcccgggacacggtgcgtcagtgcgaccgccgctgtggcgcgcggggctcgccgaccaactggttctggtctccgacgcggactgcgtcgtgggatgccaggaggccctgcgcaccgaggctcttctcctcggcggatcctcgggagcaattctgacggccattcaccgagtgtctcccacgattcccgctggttccaccgtggtgacgatcctccccgacggcggcgagcgctacatcgacaccatctacagccgctcgtgggtcgactcacacatccccgggctgccctctctcgccgactggggggctcccaaccccgccaattcgtatgacctgaacagaagtgcctcatgaagctctacaccagagagaccgtcgaaactgcgcttgtcgggcgtcatggccaggttctcagtgccgtacagagtgcatacatgctgcattcgacgggagagacatcgctgccattctcaaccttcctccgcccggccgggtatccgaacgatcggatcatcgcacttcccgcccacatcggaggcgacttcgacatagccggtatcaagtggatctcatccttcccggaaaacctcgaccggggccagcaacgagcttcctccgtactcatcctcaatagtctggagacgggatacccgaccgccctgctggagtccagtcagatttcagcaacgcgaacggcagcatcagccgccctggccagcgccaccctccatggctccgaagaccatgtcagcacgattggcatcatcggctgcggaacaatcaatcttgcaacgatcgactacctcttccacgtgcacccccagatcaacgaggtcctctccttcgatctgaggcgggagcgggcccatgagttctcgcacctcgtcaaggcttcgcacccagaggcccgggtccgtgtcgccaaggagcccgacgagattctggccgcaagcaacaccatcgcgatcgccacgaccgactcgagtcattggttggaccttccgccgtggcacgggccggggcaccaagtcgtcctgcacacgtcgctgcgagacctgtcagtgccctcgatcctggcagcggccaacgtcgttgacgatcctgatcacgtctgccgtgaagcgacgtccttggatctggcaactcagcagaccggcaaccgggacttcatcacggggagaatcggagacctccttcttggcgcgccgctgtcctcaagtcctgactcccgtgtcattttctcacccttcgggctcggcatcctcgacctcgcagtcgcctccgtcgtcattgctgccgcctcctcttcagcagtcgagatcaatgggttcgaccccgggaaacacgccacaagcatgattgaggtgaatcgatgaccaccacacagatcaacgacaacacggccgttctgcgcgacgtattccccgccggctccgtcgcattcgtgagcggtgcctcacgcggaattggcgctgcctgcgcgacagcccttgcggccgcgggatgcaacctcgccatcacttatcgaaggaaggagaacgaggcggcacaaatcgccgaatccattgaagccatcgggcgccagtgcatcacaatgcagatggacgtaaccgatgagaaccaagtgaccagagccttccgcatcattcgccagcattacggacgcctggacgccgcggtcttgaactcgggaatcaccagtgacgggcatcttgcaacaatgagccgctccaagtggagctcggtgatcgacacgaatctgaccggaaccttcctctgcacgcgcgaggcgaccaaggccatgtactcgtccggtggctcgatcgtcatggtcgcgtccaccagtggagttgcagggcgaccgggccaggccaactacgcagccagcaagggcggaatcgttgccatgatgaagacgctggccccggaggttgcggcaaagaacgtccgggtgaatgcggtggcacccggcttcattcagaccgacatggtggcggccgttccaaaagcggcactcgcccaggcaatccaacacatccccatgggccgtcttggcctggcacaggaggttgcgtcagccgttaccttcctggcctccccgctcgccgcctacatcacagggaagaccctcactatcgatggcggaatgatcaacggctgaccccaggacccgcacacccccagtaccgagaaagaaacaacaatgaccgagatcacccacactgccaacagcatccgaacccgcgccgaggaacgttccaacaaagcttggcgcctgaaggaggagatcatctccaagctcggtctcgagaccaagccagaatatgtctcggacaaccaaccgctcttcggacgtggccttgagatggattcccttgacactctcgaagtcgtcgtcgccgtcaacaatgagttcggagtctcggtcaacgacgacgacgtacaggcgttcggctcgatcaatgccatggtcgatttcatcgaggtgaacgagaagtgagttctcttgcgctcgaggcgccacccaaggacgcccgtaagaaattcgcctacgacagcgatgccatcaagacgatgctcccacatcgttggccgatgctcatgattgatcgcgcctacgacgtcgtcccagggaaatcgggcaaaggcatcaagtcggtcagcgtcaatgagccgttcttcgccggtcactaccctgaccattccatcatgcccggcgtcatgatcgtcgagtcgatggctcaactcgtggccgtcatctacgtagccgaggccattcagaacaatcccggcatgacgtcgcacgacgcacgttcaagcgttggttatctcggcgcgatccgtcagatgaagttccgacgcctcgtcactccgggcgaccaactcaccctccacgcccagctcggcgagaaagtgggggctctgcgcgaggtttccgtgagagcactcaatggccgggatgtcgtcgcccagggggaactcgtcgtcaccgagcggtgacacccagccacacacgagaaggaagtcccatgatcgttcgcccctacaggccacgtgatgcggaagcgatcgtacatctctacaacagccattccgactcccccaatccagtgtcgggagggattgttgaggaggagttccagagggagctcgaagaacgtggttcgacagtgttcctagtggccgaggaggccggatccattgtcggcacattcgggatgttccgcacgaatggccgacacaccatggccgatgatgaagtcttcgccgacatgttctatgtcaccccgtcacatcgactctcgacagttccgggacagctaatcactgaagccatcagcgagtgcttcatccagggcatcaacgtgatccgcctcaccgtgaaccccgcgaacatctccgcgctcaaggtttacagaaaagtcggttgtgcctgtctcggggccaccgatgcaggcgaggacgggaacattgagctgtacaacttcatccctctggttcttagggcaaccatcaccaaactcgaccacgattgtattcgagccctggcggacatgacttcgttcgcctgcatcaccgagggacgtccacttgatctgtcccacgacttcatcgtggacgctggacggaagatcgtctcccacagcatccagatcgggcgttcaaccatccacgccatggtcgacacgggctcgaggaccattgtggaggccaccctcgacaaccgcgactgggatgctcctcgccagatcgtcgcccccaccccctgtcagaaccggcccgaggaacagcgaggcaaccctgtccggctggtgcacaagaagcttgaggtcaccttcaacgaaggagtcattgagatcagtacgactggccactggggcccggtcctcgcaatgtcctggccctcctccgtctcgcaccgcgctcacgggtggcgacagggccccgccaagtcgtatcgatgcgagcttctcgagaattgcctcgtcctggatgacgaaggaggagtgaaatgcaccatcagcctcaatgattgccaagtcgcgatccggatggatggtgccccaaaaacggaattgagaatgtaccagtggtgcagcctgcgccagggctatctgacggctgacaccggcatcacgagcttcaaccgggcatccagtgggctcggagtcgccgtccgggactcgtccgagattgtcgccgcgggccttcccgtcatccctgacacaccgatcacatggagtgagggtgacatcacggttcagctcgatccctgcggccgcgcctccctgatccactcgaccctggtggaccgaagaatccacttggacgagtctggctcggcaagtctcaccatgaccgtgtttggtgattcccagccccatcgtgccgacaccgtcgagctgcctcccctcgcggcaggcaccgacaggatcgtcctcaagccggctgccggaggcgtgaccacatggcgcttgggcgccaccaaggtgctcaagtcaccgtggccacacgcccgcgcgctcgggcccaatccgatctggcgagccggcctgtgggtcagtcacgagccggatcgccacgaccgtcgccaaggaatggggtggggtcccgatcatcgcagttggaccctgtcggaagacaccatgaccagtactgacgggacactctcctggcgcttcagcggctcccccgacaccggctggacggtcgacgtcacgacgagcaacacgcacggggagaccgtcgtctggctcaccccggactgcccggcgggcgagaggatccgcacgtctgatcatgccgtgacgaccatgcttgacatctcgaagccatggcagcgctggaccacccgatgcgcaattcctctcagacacgggaagtggttcctcatcgagcctgatcatgacctcactgattcccccgaaatcctcatgcgctctgttcacggggtcctgctcgtcggctgtgtcggacgagcccactccggatccgcttcctggcgctttgccatcacgtcagaactccccacctccaacccaagaagaaacgactacacctcagccgcctgaacccaaccagttggaacacccactacagaagaaatggagcaccaccatgtccatcactgagcagtacaagacccttcgcacctcggtcggcctccacacgcctaccggtcccctggtccgtatcaccggtgatgatcgtctcgagtttctcgacaccttcctgtcccgcgcctcggacttcgtggaccccgacaccactcgggagtgcctcgctctcaccgaggacggccttccgctgacgatcttcctccacatcgagcgcgaggaggagtcatggctccttccccgcaccgccatcgatgcggcgaccctcgccacgtacctcggcaacctcgagaccgatggtgacctgtcaatcgagattgctccagagggttggggagctgtcgctgtcgaggggccgctgtcgtggcagatcgccgaaaaccttctcgacttcgacgtggctggcctcgttcttcacgccgtcacggacgtcgtcgttcccggggcccccgagggatcgaaggcatggctcgcccgggtcggaaccactggagagtacggctacctgctcgtctccaacgttcccgacctcgcccgcacttatctcctcagccgcgccacggagctgggcggtcaggcagtcgacgccgatgctctcgcacgagtccaggccgaggccgggatgccctattacgcgatgggcgtgtgccacctcgatgtcgccgggggtgacctcgcctggctcgtggactggcagcgcatcggcgagttccaaggatccgagaatctgcccacacccgtccgagaccagcgccgactggccgccatcgccctgcccaccggcaaccgcccggaagctggtcagaccgtcgctgccggggatgaggagattggaatggtggtgtacgtcaccccgtccgccaatcccgatgaggaactcgcgttcgcacttctggatgctcctttctggactcccacccttccgttgaccgtcggtgcccacgacgggaccacggtcaccctgccccgcgtcgtggcagcctccagcctcaacaagatggggtgacagcgatgacgatcactgctgagaacgccaccacccgcagcgacattgcccggagcattgcggtgaccggcgtgggactggtcacggcacagggtgaccataccgacgagtgctggaccgaacttgtcgatggggtttgcggaatcaccatgaacgtcacgttcgatgactctggcaccacgattccgtgtgctggcgtggctcccattccgaactctgattcgatcgaccgctgttacctgctcggcgtccatgccatgcgtgaagctctcgagatgagtggcatcgacctggactccgtgggtcgtgatcgcatcggactcgtggtgggctcaagcctcggcgcgatgcccaccttggaggcggctcatcgccgggccattgagaccggcgtgctcgatgccggattggcggcagactcccagctccactgcgtcgccgaccacctcgccgctgagttcgacatccgtggaccccgcgtcgtgacatcgaatgcgtgtgccgctggtgccgtggcgatcggctacgccgcagaactcctctggtccgacgatgtggacctggtcgtctgtggcggtgtcgatccactggcccagatctctgccaatgggttcacgtgcctgggagctctcgacaatctcccatgcagcccgatggccggttcctccggtctgactctgggcgagggagccgggttcatggtcctcgagagaacagatgcggcggctgccagaggccaggaggtgatggccgaaatcgccggctacggcacaagttgtgatggttaccaccagactgccccggacccgggtggcaatggcgcccgcagctcaatggaggccgccctgcgctcagctcatctcaagccgtccgacgtcagctacgtcaatctccacggcaccggtactccgaccaacgacgccgtcgagccgaaggcactccggtcattgttcaagtccgatgaccttccccctgtcagttcggtgaagggcgccatcggtcacactctcggcgctgctggcgccatcgaggccgtgtgctcgatcaaggccatccacgagggggtcctgccgccaaccgtcaacaaccgcgggcaggcttcccgaactggtctcgacatcgtgccggagtgcgcacgcaaggccgctcccgacgtggtcatctccaactccttcgccttcgggggcaacaacgcatcagtggtcatcaccgcacctcgaggaggcgttcactgtaccgccccggcgcagcttcgcgaggtcggaatctcaggaatggcagctctggcgggaaaggccgccaactcggaggagcttctttcggccctgtcagaagattgtccaatctggatggccgatgagaagacctgggaaggggatgctgtccaaaccggccatgtggacatcaagcgcctgtcccgcacaatcaacccgtccaaggttcgtcggatggaccccttgggaatcatctccagcgcggtggtgactgatctgtatgcccgacacgggaagctgagccgcaaggatgccgaaagcacgggaatcatcttcgcaaccggctacggtcctgtgacggcggtgacgcagttcaatgacgggatcatccgccacggttccgagggtgccaacgccctggtgttcccgaacaccgtggtcaacgcagccgcaggccacctcgcgatgctgaatcgctaccgtggttacacggccaccttggcatgcggtggaaccagttcactcatggcgctgcttctcgctgctcgcgtcgttggccgcggcgctgcggatcgcatcatggtcgttatcgctgacgagtttcccagcattgccgtccaggccgtcgcgaagcttcctggctaccgacacagggttgatggttccggagccgtgctctcggaaggcgcggtatgcgtcctggtggaggccgtcgaagtcgccgaagcacgcggtaccgcccccatggcgctgctacgcggcttcggatcccgtggagagtccgtgggagtcggtcacaccgcatccgatggacgggcttgggccaaggccatggccgctgcactgggcccggccggcctgactgcctccgacgtgtcgaccgtcgtggcggcatcaagcggacatcctcgcgtcgaccgagccgagcaggcggccaggcggatcgtcggactgtccgcaaccgctacgaccttcccaaaggcgattgtcggagaaacacacggatcggctgccgggatcgggctgttcggtgccctgtgcggttcgaggtcagccgcgcaccagaacatccttgtcaacgccttttcccacggcggtggttatgcctcgatggtggtggagtcactgtgaccacgacgcttctgccacgggttgcccagccgggaccgggcgtcagccatgtcgacaccgaccgtcccatcgagtgcatcatcacccaccacccccacatgccgcgtgatcgcggaggccacgccacctccgtgtcaggcaggtacttgctgcgccaagccgcagaactcatgctcggcacggatcctgcgcattgccccgtcgtcgacccttcgcggcgctggtactggcccggaatcaatcttcacggttctgtctcccatgtcccgggctggagcctgacgacgctgagcaccggcggccacatcggggcagacatccaggacttccgggagcgtcccggcgcaatggcattcatcggtgacctggtcaagctgtcgcgatcggcgtcactccgagaattcgcggagtgcgaggccgtcgtcaaggtgtccgaattgactaaggagacgttcgggcacgtgcgactgcccgaatggacacccggatggcgccacgttttcgaggactactgggtctggagtctcgagatgcacgggatgggagtcatcgcactcgcatccgatctcccccgagccattcgctggtggcggtgcgacgccgatgcccgtggccgtctccaggctctccgacccataagcagtcttggaccaggaaggccgtcatgagccggtactcacgtcgaatctcaggcatcgaacgcggctatctcaacgccgcaacccggggcccgcaccccaccatccacacgatgatcgacttcgagggccgcgtccccgccgactgttggcggcacgcatccacgattgcgtcggccgccaaccctggcatgacagtggtccggaggtcgggccgatggacatccgatccagcgggctgtccggttgtgttccacgactggaccgcggaccccaacgacgttgccgacttccacgctgacatggatctcgtgacgggaccatcgtccacgctccacgttttcgagggggcggaacgcacccgaatcaccttggcagcaagccatgccgtgaccgatgggcggggcatcgaacgatttctcgtcgacctgcttgcagcgttggacgagcgtgaacccattggaagccccgacaccctgaccgatgtcgatatcaaacgatccttggagaacagcatcaagccccgacgccacctggccgctgtgcccgccgatgtcctttctccactgggggggaggaagaaccaacgtatatgggcctccaggacgtggcacagtgccccgggagccatgagcggaagaatcgctgccgctgtggccgagatgatcgaccacgccgcaatgatcatcatcccggttgacatccggcggcacgtcccagaggtccgatccacagcaaacctaagtgcccaactgccagtgatcatcaccccgaaccagcgctggcaaagcatccatgggcatctgctcacggaccttgctcgccatcgagaccttgcgatcatcagtgaggatttccgccacaacaatccgttcgcatcgaccttggaggaaagccaggccatcggcctcgatggtgtctatccctgtgccgcaatcatctccgaccacgggaagctcgacctttcaaggttccagaccttggaactcaccccggtctcgatgcgaagcctcccgatgctcgttccctactccgcaatgttcatcagcagttgcaccgtcggcgagaccaccactgtcaccatcgctcatcgcgctgatgacgatcccgattccataaacaccttcttccaccacatcgaatcccagatgtccatctgagccacgtcgtccctggagagcaaacatgaccacccaaaatgtcatcaccccgccgcgccccgtcacctcccatgccacggcgaccaggtccgaggctccaccgcgaagcgtcatcagagccatggccatctcgatggtcgcgaccctcatggtcatgctcgacacgaccgtcgtgaacgtgtccttgagcgcgaccaccgcccgcttcgggagcatgggcagcgtgcagtgggtcctcacaagttacctacttgcactgtgcgcgacgatgacggcctccgcctgggtcatcgaccgccttggtccacggctcaccttcatcgcctcaatgaccatgttcctcatcggctcggtgatgtgtgcactgagcgattcagtgtggcaactcgtcactggcaggaccatctccggtgccggagctgggatccttgttccgacagcatccgtcctgcttatccgtggcatcccacgcgaacaacttggcagggtgcaggcactgaatgggagtgtccagttgatcgctcccctgatcggcccgactgtgggcggtctcctcgttgacaggtgcgggggctggccggccatctactgggcgaacgtccccgtagctcttgttcttctgattgaggccgtccgcgtcgatccggacgaaccacacaccgctaagcgccgcctcgatgctctcggcctggtctgtggcagcaccgcgatcgtgctgacagtgcttggtgtctcactcttcggcaggacgtcgcgaaacaccaccttcctgcttacgatcggcgcgcttgcagtcctcgcatgggcgttcttcatcacccacatccgaagggctaccaaccctctgcttgacgtttccctgtatcagaaccctgtctattcatggtccagcttcaacgtagcggtgcttggtttcggtctctacgcccccatggtcgtcatgcccctctatctcgaggcgacgcgccacctcactgccgtccacactggtctggtgatgtcagtggccggcgtcggcgtcattatggccggaatcctgtgcacgaagatcatgggccggatcggtggaggcctcacgatgacagttggcataactctgagcatcatcgccactctgcccctggtccggctgacgaaccacacctcctacatactcctggcagtctgcttggccttgcgtggagcaggaatcagcctgacaatcgtcccagccatgacacgggccttcgagtccatcaagaggacggccatggcggacgcctctgcacagctcaacctgttgcagcgaatcggcgggacaattgcgacagcagtcatcatcgcagttatccaccacgaggccatgctcacccgcggactctcccccacagtgttctcgcacgccaacgtgtggatcctcaccgcgaccgccgtcacccttctgccggccttcgcgcttgcgaaggccgaaagacaacagcaggatctctgagcaccgaggagtactccctcgtagaccctcctctgatctaattgggttcgttccaagtgtgtatctcactccggggagccccgattgctgaaccacatcccgttcaccctggcgagtccctcgtggtacgacgtcccctgggcgcccggatctccgtatctcacaggagatatctcggtcctgccagcggactcgccaaggtggacgacgaccatccggggtccttggcaaatccacatgccacctcgtccgacccttccagaggtggggtggaaagtgcatgtgtctgccaagccatcggaattggaatcggttgcctcagtcgtagcactgtggtgcgtacgccacagcgtccccttcaaagtacttcgcacccgaggtctcgttcacgcgagtcaagtcaagtatgcggaccgaagtcagagcggcaaggtctgcacctgctaccccgacggcgagagccttgagcacttctgctccggtcttgccgagctgcttcagaacgtcgattcacctccggtgtccggcgagctgcgagtcggatcctcccctctgtggttgcgtcacgggagtttccgagaggcatgggcggtgtcatccacaggagtaccgttcccggtctacccgggaacaacacatcctgatcgtcgaggccccgcgcccgcagaatccgatcacgacacgccgtggatccggaggctccgtcggacgaatcgccccagcacggttcttcccatcgacgatgtcagactcctccaccgatcaaatgctggcggcgtgtatcaggcaacatggagagacggcacatcggtagtcgtcaaggaggcccggcacctgtccggacttgatgcggcgggtgtcgacgcccgagtgcggctgcgtcacgagtacgaggccctgagaagactggacccctatcgggccgctccccatcccattgatctcattgagaccgaggacggctcgttcctgatcatggaattccttgacggaatgacagtccaccaggagatgtcgaggttccatcctctgattagtaggcgacctcatcggctatcgatgaccgatttttcacgctggtgccgagaggtcgaagatcgcttgaggaatgtcacgagggtcatggccgggtgcggaatcgttcacggggatcttcatcccgcgaatctgatacatgtcggccatgaggttttggttactgactttgaatcctgctcaatcgacggggtcgccgtctcgtcagggatcgccgctccctggttccagtcggacgacacgattcccgatccggcgacgactgacgatctccacactcttctcgtggatccgacttgcggccccgcgcttgtcccccatccaaatcttcgcgcgctcatcagccaggccgcagtcgaggacatgatgggaaatccgactggtttaccacatgcctggaacctcgaggacatgacaagcgaactcgccaaggggatccgggcatcagccactcccgcacgagccgaccgcctctttccctcagacccctacctgttcgggcatccaggttcagaattcggcctgatgcatggcgccgccggaatcatggctgctcttgccgtgactgggtacggtgttgacgcgaatcacgtgacctggatgaaggaccgcttggccacccgcccgaccctgctgccggggttggccaacggaatcgagggaattgccctgggtctctccctgtgcggtcagaacgacatggctgcatccctgctccaccagtccggaattctcacgatcacaacgaacggatcgactgacctcaccctcggtactggtatggcgggccgagcgtgcgcgctgcagtccctctcacaacgactgtcatcgaaatctctcgcccacgctgcatataccctctgggaacaactcgccgtggctgtgcggaacactgatgtggccttgccgaacggcctgttctccggttgggagggaatcgggctctccctgcttgcctctcccctgccggatcgtcatgatctcgcccgccactcactccgactggccctggccacgacaacgattgttgacggtgcgctcttctcaggcgagggacagatccgatggccatatctggggcgtggtcccgcggcatgtggcccgctcgccgccaggcttgatgatgaccagacggccaaggccgtggcacagacctgtcgttgtcccctgactgagtcatccggtctccacaatggccgcgcaggtctcctactcgtcctccgccagctcgtgggagaccaagacgacgccgttcgccgccacctcatgagactgtcgtggtcgatggaccgtcgcgaggaaggcacattgctgctgggtgatcatggcctgcgtttctcatccgatctcgcgacggggtcagccggcgccctcctcgccctgagcagggacccatggcggaacatgacacgaatgctcggaatatgcgatgacacctgtcatggcccactagtgacagtttgatctagcgccgatagttcacaactgaaagactccaaacatcgaggaaaacatgctgagccaaaacgccttggcaggcgtggctcgtttcaccacgatgaacaccaggagacagaatgtccgttgaggccatgcaatccatcgagatggacgaggaaaacagcgccagccagacagtttgcgcttgttacagcttcttctcgtggtcaggatgctgcgtagtctcccaagcggtggaagcatcttgatcgtgtgagacgccgtcgactaccctgtcccccgtggtacgcacacgccccgtcctggacagtcccggaagaccgctcatcgcctccggagtcgtcctggcggtcctgctcatcatcgcggtgatgacgatggtgcttcagcgcgaccccactctcacccccggacgccgcattctcggtatcgtcctgtccacggtccaggccgtcggattcatgtggctgcagacccgcatggttcgtcacggcaagggttcgcgcaacatgcgtgcgacccttggaagggtcggtttctgggccacgtggggactcgtcgcagtgggagtcgtcaatctgtggctgaccaactcgtggaccctcttcggggcctccgtcgccacgcccctccttctcctgccaggggtgtggagtgtggtggccaccctcgtgaccctgatcgtcggtttctccgacctcgtggtcacccacacctcgccactgacctcagccacggtcgtgctggtgaccatcgcggtgtcggtgaacctctacgcattcacgaagctgtcgacggcactcgttgaactccgctcctcccaggaggagatcgcccggctgcgcgtggacgccgagcgtcaccggatatcgcgggacctccacgacatcatcggtcgcaccctggtcgccacgtcgatgcgccagcaggcggccctccacctcgtcgaccgcgacccgcaacgggccaaggaacagctcgacgccgcccatgacgcaatcaccgaggggcagcaccagttgcgttccatcatccaggccgagatgagcaccagcctccccgacgagatcagcgacgccacattcctgtgcgaccgactccacatcgacttccgcatggatgaccgcggcagaccgcacaaacccttcgactcggcggcggcggcggccctgcgcgagggaatcacgaacatgctcaagcacagcgcggcgggctactgccacgtcgccatctccccggacctcctgaccgtcaccaacgacggttgtccgcaatcacctcgcccctccaccacaccgggcaccggaatcgaccatctccggtcccagatcgaggcgctcggtgggtcggtgacgacgtcgcggccctcgcggggcaccttccggctccgctgctccttcccgacccggggggcgtccacgaccacacccgcgaccgaaggaggacgatgacgacgagaatcctcctcgccgaggacatcaaactggtggcagaggccttcgaggcactgctctcggtggaaccggagttcgaggtcgtcgcacgggtggcacgcggcgacgacctggtcacatccgccacccgcctgttccccgacgtgatcctggccgacatcgacatgcccgggatgaccggcatcgaggccacccgaatgcttcgcgacaagggataccgcggcagaatcatcctgctcaccgccctgccgggaagcgggcacctgcacgccgcgatggctgccggagccgacgggtacctgctcaagtcgatcaccgcgccctccctcatcaacgccatccgggcggtgtgcaacggccagtcggccatcgacccgaacgtcgccgcggtcgccatgcgcaagggaccctcgcccctcaacgaccgggaaaccgagattctgcgcctagtcgccgacggttcctccaccgcgcagatcgcctcgcggctgtacctcagcaagggcaccgtcaggaactacctgtcgacggcgatgtcgaagctcgacgccgactcacgcacagcggcggtcacgcgggcacgcgaggagggctggctgtagcaggcgacccgctcagcccaccgcccctcagcccgccgactcctgacgcacggcctcctcgaccgcccggctgagcagggacccggccctgaccatcgacgtctccgggtccggctcgagatcggacaacgcgatgatccggtcgaacgcggaccgtttctcctcgggcaggtcacagcgtccgcacaccgcccagacgggcaccccggcgtcccgggcgatcttgcggatggtgtcgggaagcttgccgagcagggtctgctggtccagccgcccctcccccgtgacgacgagactggaggcggagatccgcgacaccgcgcgggaccatcccaggacgaccgccgcgcccgggcggtacctggtccccaggcacatcagcgcccagccgacccggctgggcggctgcgaaccccctggccaccgcccggcaggcctttcccgaactcagcgaccccttgaaggagtcgacggcaacgatgaccggcgcattcggatcaggacgcatgggatcagcatgtcacgtcgatacggagcagtcgcgccgcctacccctagactcgggggcatggtcaaccgagtctacctgtccctgagcgttctcgccctcgtgctgtgggtggtcgcctaccgtcacatgccgggctgggccgcgggcatcaccctggtgggcatcgtcgtgctgtcgctgtggtgcgagtggtcgcgggtgcgcaccctggccaggatcggcaagtcccgccagcagggcccccgctcctcccgaggacgcaacctgtcgtgagcaatacgattcccgcagccctccaccccggccctgacgaggcc

SEQ ID NO: 33 - DNA, 88 bp, Propionibacterium acnes
  source 1..88: mol_type = genomic DNA
agtcggtcccaagggttgggctgttcgcccattaaagcggcacgcgagctgggttcagaacgtcgtgagacagttcggtccctatccg

SEQ ID NO: 34 - DNA, 88 bp, Propionibacterium acnes; identical to SEQ ID NO: 33
  source 1..88: mol_type = genomic DNA

SEQ ID NO: 35 - DNA, 88 bp, Propionibacterium acnes; identical to SEQ ID NO: 33
  source 1..88: mol_type = genomic DNA

SEQ ID NO: 36 - DNA, 88 bp, Propionibacterium acnes; identical to SEQ ID NO: 33
  source 1..88: mol_type = genomic DNA

SEQ ID NO: 37 - DNA, 88 bp, Propionibacterium avidum; identical to SEQ ID NO: 33
  source 1..88: mol_type = genomic DNA

SEQ ID NO: 38 - DNA, 88 bp, Propionibacterium acidipropionici
  source 1..88: mol_type = genomic DNA
agtcggtcccaagggttgggctgttcgcccattaaagcggcacgcgagctgggtttagaacgtcgtgagacagttcggtccctatccg

SEQ ID NO: 39 - DNA, 88 bp, Staphylococcus aureus
  source 1..88: mol_type = genomic DNA
agtcggtcccaagggttgggctgttcgcccattaaagcggtacgcgagctgggttcagaacgtcgtgagacagttcggtccctatccg

SEQ ID NO: 40 - DNA, 88 bp, Staphylococcus aureus; identical to SEQ ID NO: 39
  source 1..88: mol_type = genomic DNA

SEQ ID NO: 41 - DNA, 88 bp, Staphylococcus aureus; identical to SEQ ID NO: 39
  source 1..88: mol_type = genomic DNA

SEQ ID NO: 42 - DNA, 88 bp, Staphylococcus epidermidis; identical to SEQ ID NO: 39
  source 1..88: mol_type = genomic DNA

SEQ ID NO: 43 - DNA, 88 bp, Staphylococcus epidermidis; identical to SEQ ID NO: 39
  source 1..88: mol_type = genomic DNA

SEQ ID NO: 44 - DNA, 32 bp, Propionibacterium acnes
  source 1..32: mol_type = genomic DNA
caaccgtagatacagatacatctgaggagatc

SEQ ID NO: 45 - DNA, 12 bp, Propionibacterium acnes
  source 1..12: mol_type = genomic DNA
catgaagaaaaa

SEQ ID NO: 46 - skipped

SEQ ID NO: 47 - DNA, 18 bp, Propionibacterium acnes
  source 1..18: mol_type = genomic DNA
tcaggttcgcaatgaaga

SEQ ID NO: 48 - DNA, 183 bp, Propionibacterium acnes
  source 1..183: mol_type = genomic DNA
atgacagacaggtcctatccggcgatgatccggcttcggcgcaacgcctggaccgagttcgtcccgttcctggattacgacgtcgagatccgcaagatcctctgctcgacgaacgcgatcaagtcgttgaacacccgcttccgcacggtcatgcgggcgcagggtcatttcccgacgcgctga

SEQ ID NO: 49 - DNA, 26 bp, Propionibacterium acnes
  source 1..26: mol_type = genomic DNA
caaccgcagatgcatctgagaagatc

SEQ ID NO: 50 - DNA, 12 bp, Propionibacterium acnes
  source 1..12: mol_type = genomic DNA
catgaagaaaaa

SEQ ID NO: 51 - DNA, 2299 bp, Propionibacterium acnes
  source 1..2299: mol_type = genomic DNA
ttggtcagcgcccaccgatgccttacaccgtgacacgctcgaagtggcgatggaacacctacgcttcgaacctgattcgatcgcttcggtggcctcctgctgacgctttcatggatcgtgtcagcctggaggatggtaatgcgcccaaaactgtatgtcttcggtagatctgcacaagcggatcatctcgcgcaagaaggaaccgtgaggtactcgatccggtacactctccacatcaaaaccaacaatacaagtcacagtcatagatagttgtgtcattaacaagaaatcccaacagcaccccaatgcaaaattgcacagaacgacctagccagatgattttcagcaagtctaccatgacagcaaaggccgcagatagaaactgtgacatatacattgcacgctgaacttactaccccaccactaaatttacatagattccataccgacccgaacgccaccagtcaaccatcagtaatcatcatcgagaagtcaaaaataaccaacaccattgataagatccatgccatggacgggcagacgtctgtgatcagcagagtcgagaaacgaggtaaagcaaactatcacgagccaccagataatacccctagaagcttgtccaatatgttagctctggttaacatgccatcgccagcacaagattaacacgcttgttcatgtcttcagaaagcaacgaagctcgcctagatacttggacatttatatccttgcaaacccccccctaaagcctccaaaaatccttgatttacctcactaatataccattaatttgccccacctcaagccaacaaaagaacggagcatcagagccataggaagcctccgccagacataggggactaaacattatctccttctacgtcaccaactagaattcataaagcatcaacctacttatttaattcgatctaaaatccaatatccttagtatcagggatcaataaaaccaaaattaggaaacatacttaaaatcatgacatttcacttagtagacatactttgggattgtatcgacgcgtgacattgacacccatatttctgcggcagaatgcaccccggcaatccattgccaacatgcatgacacaccagcccatcagacccgaggtgaggtgatacactgttggagttagttcctggtacgcaaaccgcacagcccggtaggaagtccgggcggcgcaatagacgtccgtcgctcccctcatggagaatccagtgtcgccaggtccgcttcggcgtactgggagatgatatgcctacgatgttcactgtctacttcgatggccagttctgggtcggagtcctagagaggcgcgacgagggtttggtgcgtgccgtaaaagtcacgtttggcgccgaaccgtctgacacggaattgtacgagtgggttagccgtcatggcaacgcacttatagagcgattggagtctaccgctgctgtccctaccacccgcagtccccgagccaagcgactgaaccccaagagggcgttacgagatgcagcgcgagctgcccaagcaccccgtgccagcacggccgcacaggccgcgcttaaggccgatcaggaagctcggggtcgcgccgccacagtgaagcgcaagcaggcccggatcgacaaagctgcggagcagtgggctaagaaacgagagcgcgcgaaggcaaagcaccgtggccactaatgcgtcgaccgtgcccttcccaactgtgattcttggttcgggacctatggcttcacggtcaaggcggtcaaatcgctcacacatgagtactattcacccgacatgccatcgtctgggcaatcacccaactgcaagctgatgacgttttcctcctaggcttgatgcactagtttagtgtggacaggaagactcatggcgaagggaacggcctgttctcaagatcgccaccgcgaacgagattcacttcccacggtgtacgcatactaaggggcggagcttgtctgacatcatctgggccagcacgcacatggcccagatgatgcccaccggatggtgagcctgacccgtaacaagaacgcatcagcgagcacctcgccgacgcggctgcgcacgcggtcgtaacctcgccactgcctgcgtgaacaacgcgcttcggcgcattcaacacgccgtgaccgcggcgcccacggcttgcgcaaccgctacaactaccacctactgtcgcctcctggtcgttggcggcataacccataaccatcttcaaatccgaagcgccgagtcctgccataattcgaaccttcagcctgcatgactggaacaag

SEQ ID NO: 52 - DNA, 2299 bp, Propionibacterium acnes; identical to SEQ ID NO: 51
  source 1..2299: mol_type = genomic DNA

SEQ ID NO: 53 - DNA, 2299 bp, Propionibacterium acnes; identical to SEQ ID NO: 51
  source 1..2299: mol_type = genomic DNA

SEQ ID NO: 54 - DNA, 2298 bp, Propionibacterium acnes
  source 1..2298: mol_type = genomic DNA
ttggtcagcgcccaccgatgccttacaccgtgacacgctcgaagtggcgatggaacacctacgcttcgaacctgattcgatcgcttcggtggcctcctgctgacgctttcatggatcgtgtcagcctggaggatggtaatgcgcccaaaactgtatgtcttcggtagatctgcacaagcggatcatctcgcgcaagaaggaaccgtgaggtactcgatccggtacactctccacatcaaaaccaacaatacaagtcacagtcatagatagttgtgtcattaacaagaaatcccaacagcaccccaatgcaaaattgcacagaacgacctagccagatgattttcagcaagtctaccatgacagcaaaggccgcagatagaaactgtgacatatacattgcacgctgaacttactaccccaccactaaatttacatagattccataccgacccgaacgccaccagtcaaccatcagtaatcatcatcgagaagtcaaaaataaccaacaccattgataagatccatgccatggacgggcagacgtctgtgatcagcagagtcgagaaacgaggtaaagcaaactatcacgagccaccagataatacccctagaagcttgtccaatatgttagctctggttaacatgccatcgccagcacaagattaacacgcttgttcatgtcttcagaaagcaacgaagctcgcctagatacttggacatttatatccttgcaaaccccccctaaagcctccaaaaatccttgatttacctcactaatataccattaatttgccccacctcaagccaacaaaagaacggagcatcagagccataggaagcctccgccagacataggggactaaacattatctccttctacgtcaccaactagaattcataaagcatcaacctacttatttaattcgatctaaaatccaatatccttagtatcagggatcaataaaaccaaaattaggaaacatacttaaaatcatgacatttcacttagtagacatactttgggattgtatcgacgcgtgacattgacacccatatttctgcggcagaatgcaccccggcaatccattgccaacatgcatgacacaccagcccatcagacccgaggtgaggtgatacactgttggagttagttcctggtacgcaaaccgcacagcccggtaggaagtccgggcggcgcaatagacgtccgtcgctcccctcatggagaatccagtgtcgccaggtccgcttcggcgtactgggagatgatatgcctacgatgttcactgtctacttcgatggccagttctgggtcggagtcctagagaggcgcgacgagggtttggtgcgtgccgtaaaagtcacgtttggcgccgaaccgtctgacacggaattgtacgagtgggttagccgtcatggcaacgcacttatagagcgattggagtctaccgctgctgtccctaccacccgcagtccccgagccaagcgactgaaccccaagagggcgttacgagatgcagcgcgagctgcccaagcaccccgtgccagcacggccgcacaggccgcgcttaaggccgatcaggaagctcggggtcgcgccgccacagtgaagcgcaagcaggcccggatcgacaaagctgcggagcagtgggctaagaaacgagagcgcgcgaaggcaaagcaccgtggccactaatgcgtcgaccgtgcccttcccaactgtgattcttggttcgggacctatggcttcacggtcaaggcggtcaaatcgctcacacatgagtactattcacccgacatgccatcgtctgggcaatcacccaactgcaagctgatgacgttttcctcctaggcttgatgcactagtttagtgtggacaggaagactcatggcgaagggaacggcctgttctcaagatcgccaccgcgaacgagattcacttcccacggtgtacgcatactaaggggcggagcttgtctgacatcatctgggccagcacgcacatggcccagatgatgcccaccggatggtgagcctgacccgtaacaagaacgcatcagcgagcacctcgccgacgcggctgcgcacgcggtcgtaacctcgccactgcctgcgtgaacaacgcgcttcggcgcattcaacacgccgtgaccgcggcgcccacggcttgcgcaaccgctacaactaccacctactgtcgcctcctggtcgttggcggcataacccataaccatcttcaaatccgaagcgccgagtcctgccataattcgaaccttcagcctgcatgactggaacaag

SEQ ID NO: 55 - skipped

SEQ ID NO: 56 - DNA, 18 bp, Propionibacterium acnes
  source 1..18: mol_type = genomic DNA
tcaggttcgcaatgaaga

SEQ ID NO: 57 - DNA, 44 bp, Propionibacterium acnes
  source 1..44: mol_type = genomic DNA
caaccgtagatacagatacatctgaggagatccatgaagaaaaa

SEQ ID NO: 58 - DNA, 38 bp, Propionibacterium acnes
  source 1..38: mol_type = genomic DNA
caaccgcagatgcatctgagaagatccatgaagaaaaa

SEQ ID NO: 59-81 - skipped (23 entries)

SEQ ID NO: 82 - DNA, 6363 bp, Propionibacterium acnes; identical to SEQ ID NO: 29
  source 1..6363: mol_type = genomic DNA

SEQ ID NO: 83 - DNA, 6363 bp, Propionibacterium acnes
  source 1..6363: mol_type = genomic DNA
gtgttgtggactctcggggtcagtctgtccgctcacttgagatggcttaacatttctgaccgacgccgaagtctacgaacgctgcgaaacgccaaccgacgcctttgcaaccaagccttcttcatcaagatctacatcgacgaagacgaccaactccgcgtcgagaacaaccgacctttcgaaatgctcctcgaccctcagatcaacgccaacgccctcacctgggcccagaacggcaacaaggcccgaatcgaaactaaggggttcgagccttgtgcgtggggttacttagacgttcattttgatacaaggatctgggtgggtgcacggaggggctaggtgggtgcattgcatcctgacaggagcgccgggtgagttctggttgactaccagcagcgtgttcggtatgctagaggatagttacgcgacagcgtccgttccaatttctgggagtgtgttaattccgatggtgctgtgatctccgttcggctacgccgagaagcgtccaaatgtttcgacggttttggggatcaatatgtctgctatcgaggtaatcaatctttctttttcattttccgctcagccactcttggataacgtttcattcagcgttggcgatagcgagcgcgcagtacttgtggggcctaatggctctggcaaaaccactctcctgcgcctgatacgaggagagctaaccccggatcgaggacatatcgccatcagtgatgcaggagatgcaggttcttgtcgcttcccttatgttcgtgacgccactggcacagttcaggactatctggacgacgtgttggctggcccatgggagttgctcactcgcttcgaccacgtgacgaagcaactatcggctgcccaaagttcagcgagtctcgctaaagagtacgatcacatactcaccagtcttactctggccgacgtatggtcgctcgaagctcgaatcgatgaagtgttagccggtttaggtctaggccagctgaccggacgcggtcgacagcgcgcactcggctcactctcccctggccaggcagtgcggctcgaactggcaggcatcattatggtcagaccagtaactctggtcttggatgaacccaccaatcatcttgatgacgaagccgtaggctttctgatccagcaaataacagattggccggggccagtgctcatggccagtcataatcgtgcgtttattgaagagacagccacggtcatctatgacctcgatattgccccgtggcaggctttggccacagctgaaggagaggctgtgtctggcgtgtaccggtgcactggcgcctatagtgattatcttggcgccaaacaacacgcccgcatggagcatcaaaagcttcacgccacccagcaatctgaaaaacgcgcgattcgaagtcatcgccgtcgtagcgaagatatcgctcgtggtggagtgaaattagcgaaggcgcagggcatggcacgtaagttcttctctgaccgggcagaaaagaccgcgctgcgacgcacgcgtaacgacgatcaacgcttacacgatcttgctgaacatgaggtgcgaaaaccccgcaactaccaacttaagctcaaccttccaccagtcggctcgcgtggcgggttagccgtcacggcacgaagcgccttcattccaggcaggcttctcccaatcacgttcgaccttgccacgggggaacatttaatactgactggcccgaatggagcggggaaaaccacgctcttgaattggcttgctagtgggaaaacaacaatcgaccctagatccgaagccagcggcactatctctgtcagcgggcggcttgcttacgtcccacagcgcctaccacgcacaggagattcctactttcacccagaacattggaaagacgggatcagagaacttggcacgggaatactccacccatccatgtgggccaccccagtcggccaactttcagatggaaaccagcgtcgagcccagatcgcgttagccgtggcgcagaaacccgagattcttgtcattgacgaaccaaccaactacctcgacctcgccacgcttgaagaactagaggacgcgctacgccaatggaacggcacactcatcatcgccagtcacgaccgctggcttatcaaccactggcagggaacacaaatcgaattatgccccacagatccagcgcccggatcaccgaatcccctcttactcgttaagagccggttcgagccgtggtagtgccgtccttgagtgtgagtttgatagcgccgtcgtggttgacggtggtgtgatcgacgagggtgttccaggcttggtcggagtattcgagtggtggttgggtggcaaggtagtcgcgtacttcgattgcttgtgctcggcggtggcgcagatcgtcgatctggtcgctgatccgttgatgctcggcctcaagttggtggtgccgatcttcaagctcgtggtaacggcggtcgtagtcgtcagggtcgtgggcggtcgtggctgcggggtgatgagttggttcatcagcgtgatggtttcttcgatccgctcccccagcgtggcctgcttggtttcgagctcgcgggtgtcgtagacggtttcgtcgagcaggcgcatggtgtcatcgagcacgtcgttgccggtgacccgcttagccagggctgcgacgaaggcgtctttgatctggtcttcggtgacgtggggtgtcgcgcagtgatgatccttgttgtatttgttgttgcagcgccagatgtagcggcggtatttgctggtggagtgccagactttccgcccaaacctcccgccgcaatcggagcaggtgatcgtgttggcgaaggggtgggtgttggaggtgcctttgcctgcgcggcgggcgagttctgcttggacggtgtcccaggtgacgggatcaatgatgggttcgtggttgctggtgacgtagtactggggtacttcgccttcgttgattttcatggtttggttaggaagtcggtggtgaagctcttttgcagcagcgcgtcgcctttgtatttctcgttggcaaggatcgaccgcacagtggagggcgaccagatttgtttgccacgcggggtggggatgccatcggatgtgaattctttggcgatggtttgtggggttgcgccttcgaggaagcgggcataaatacgacggacggttggtgcttgggtttcgtcgatggcgaggttgccgtcttcgcctttcttgtagccgagcagggacgcgtaggacaccatgattttcccgtcggcgaagcgtttacggtggtcccaggtgacattctcggaaatggagcgggattcttcttgggtgaggctggacatgatggtgatgagtagttcgcctttggaatcgagtgtccagatgttttctttttcgaagtagacctctacgcctttgtctttgagctggcggacgtggatgagggtgtcgacggtgttgcgggcgaaccgggacacgctcttggtgaggatcaaatcgatttttccggcgagggtgtcggcgatcatggttttgaagccttcacggtgtttggtgctggtgccagtgatgccttcgtcggcgtacatgcctgcgaattcccactctgtgcgggattggatgtggctcgtgtagtagtcgatttgtgcctcgtaggaggaggcttgttcttccatctcggtggatacccgcgcgtaggccgctaccctgcgccgacgccgagtaccctgcaccgtggtgtgtccgggtatttttgtggctgggatcgcggtgacacgcttgttccgaatctgcttggtggtcatatcgcactttcctcgtccaggctcaccgccactggcacttcgccgctaatggtgtggatggtgagcgtacgatcgggattgacaacgattttcacgaggcgcgtcagcgcatactcgtcgtcccagtcgtcgaggccaagcacgcgggtgcagatctgggtgagatgggtttctcggatttgtggtgcctggcagggattgcctttacctttggtggcggtttcgcaccaccaaaacttgtaggacgtgtggcggcgtgtcttggtgcggcggtgataaaacctgctacagacagagcattcaatccgagaggtgagcccggtcgttctagctgacggcgtggctccacgtccgagatgtctgcgccgggcgagctcggcctggacggcgccgaacgtggtctggtcgatgatgggcgggtgggattcgtcgacgaggtagcgtggcagctcgccggtgttggtatggcagttcaattctgcaacgtttggccggtaatacttttgcaggattacgcggccggtgtagatttcattttcgagccatttgcggatcgtcttaccgcgaaacttggctccccgcctaggcttgaccccttcagcattcaactgactgatgatcttggcttcagtctcgatgatagccaagtcactacccacgtattggtagccgtagggttggcgcgaatgcatgagcccgtcggcgtatttcttccttatcccccatttaacattcttcgacatggatcgagattcctcctgcgcaaacgatgccagcagggtcagcaggagttcaccgtcagcggtcgcggtatcgatctgttcacgctcgaaacgcactgagacgccgaggattttgagttcgcggacggcatcgagcaggtcgacggtgttgcgagtcagcctggatatcgacttcgtcaaaatcatgtcgatgtcgccggagcgggcggcggccatcatggtctggaacccctctcgacggacggtactggtgccggtgatgccttcgtcgatgaacacgcctgcatagtcccaaccaggggtggattgaatcagatgagagtagtacgacacctgggcggcaatcgaagatagctggcgttcgtgctcggtcgatacccgcgcataccctgctactcgtagccgacgtggcgtggcgggtctaggtgggataactcgaaaactacgcgaggtcactccctgcttctctttcttctatggcgacaggtgttttggttgtatccatctacgctctaaacctgagtcttatccagtcgaacctgcagcaacaatgcccccactggcgcggttgcttcatgcccgatccgcgtaaggatcacgtggctttcgtttggggtgagtgcgccggtttcggtgagccgatcaataaaggcgacctggcgggcaagatcgacttcggcattgaacatggcacccgtcacggtctgccacctcgggtgctgaagcggtgcctgatatagcaggcatgcgagcaatacttacggtgcttgtttccgtaggcctcgaagctctcaccgcaagcaacgcaggtgaaggtgtatattgcccgccggttgagccgttcggggtgggcgtgctaccacgacaaacgacacacatccgaacagaacctttgccccgccaccgcagcttcaaaatgcccattacagtgttcgcatgccttagcaggctcaacatcaaccgccggatcgatgttgatgtcagctctgcgacagatcgacttcaccgtattgcgcgacatgcccaatctggtggcgatctgcccatacgatgcgcctcggcatcgcagctccacaactcgctcacgggtaatctcacgtgccatgacgcgctcctgctcaatagaaataaggtctctactgacagggcttcgacccaccccgatttataaccaccactgtcctggtgcgatgggaacaaaaatggccccgccaccacctcatgtagtgaggcagcgacggggcgaaacaggacagttttcatgagtcttggtttagtggcggagtttttcgttgacccggcgctggacggcgtcgtagttggatccgagtctgcgtcggcgttcgttgccgttgccgtattcgccgcggatgaccgcgtcagcgagcgcgtcaatgttcggtgccggcttcggtgtgggtgcgggtttcggtgccggcgcgggtgcgggcgtgttgccggtcatgtggtcgtaccagtactgggcgcgagccatataggcggcgtgctgagtaccggccagcgatgctgggcattcggtggctgagaagtttttgtgcccgaacacgttcttaccccaggtagggcggccgagcttgtaataccgacagatcgcggccaccaaatgtgcgccgttgtcgaggcaggcgtcagagattttccatgggttagaagaggcgtcggcgtgctcgataccaatgctggtggtattggctgcccagtttccggcgtgccaggcggtgtcgcggtcccacacgagctgcccgatccgcccggaggtttctacctggtagtgggcggaggcgggccgggtctgccacac

SEQ ID NO: 84 - DNA, 6363 bp, Propionibacterium acnes; identical to SEQ ID NO: 83
  source 1..6363: mol_type = genomic DNA

SEQ ID NO: 85 - DNA, 6363 bp, Propionibacterium acnes; identical to SEQ ID NO: 83
  source 1..6363: mol_type = genomic DNA

SEQ ID NO: 86 - DNA, 6363 bp, Propionibacterium acnes; identical to SEQ ID NO: 83
  source 1..6363: mol_type = genomic DNA

SEQ ID NO: 87 - DNA, 6363 bp, Propionibacterium acnes; identical to SEQ ID NO: 83
  source 1..6363: mol_type = genomic DNA

SEQ ID NO: 88 - DNA, 6363 bp, Propionibacterium acnes; identical to SEQ ID NO: 83
  source 1..6363: mol_type = genomic DNA

SEQ ID NO: 89 - DNA, 6363 bp, Propionibacterium acnes; identical to SEQ ID NO: 83
  source 1..6363: mol_type = genomic DNA

SEQ ID NO: 90 - DNA, 6363 bp, Propionibacterium acnes; identical to SEQ ID NO: 83
  source 1..6363: mol_type = genomic DNA

SEQ ID NO: 91 - DNA, 6363 bp, Propionibacterium acnes; identical to SEQ ID NO: 83
  source 1..6363: mol_type = genomic DNA

SEQ ID NO: 92 - DNA, 6363 bp, Propionibacterium acnes; identical to SEQ ID NO: 83
  source 1..6363: mol_type = genomic DNA

SEQ ID NO: 93 - DNA, 6363 bp, Propionibacterium acnes
  source 1..6363: mol_type = genomic DNA
gtgttgtggactctcggggtcagtctgtccgctcacttgagatggcttaacatttctgaccgacgccgaagtctacgaacgctgcgaaacgccaaccgacgcctttgcaaccaagccttcttcatcaagatctacatcgacgaagacgaccaactccgcgtcgagaacaaccgacctttcgaaatgctcctcgaccctcagatcaacgccaacgccctcacctgggcccagaacggcaacaaggcccgaatcgaaactaaggggttcgagccttgtgcgtggggttacttagacgttcattttgatacaaggatctgggtgggtgcacggaggggctaggtgggtgcattgcatcctgacaggagcgccgggtgagttctggttgactaccagcagcgtgttcggtatgctagaggatagttacgcgacagcgtccgttccaatttctgggagtgtgttaattccgatggtgctgtgatctccgttcggctacgccgagaagcgtccaaatgtttcgacggttttggggatcaatatgtctgctatcgaggtaatcaatctttctttttcattttccgctcagccactcttggataacgtttcattcagcgttggcgatagcgagcgcgcagtacttgtggggcctaatggctctggcaaaaccactctcctgcgcctgatacgaggagagctaaccccggatcgaggacatatcgccatcagtgatgcaggagatgcaggttcttgtcgcttcccttatgttcgtgacgccactggcacagttcaggactatctggacgacgtgttggctggcccatgggagttgctcactcgcttcgaccacgtgacgaagcaactatcggctgcccaaagttcagcgagtctcgctaaagagtacgatcacatactcaccagtcttactctggccgacgtatggtcgctcgaagctcgaatcgatgaagtgttagccggtttaggtctaggccagctgaccggacgcggtcgacagcgcgcactcggctcactctcccctggccaggcagtgcggctcgaactggcaggcatcattatggtcagaccagtaactctggtcttggatgaacccaccaatcatcttgatgacgaagccgtaggctttctgatccagcaaataacagattggccggggccagtgctcatggccagtcataatcgtgcgtttattgaagagacagccacggtcatctatgacctcgatattgccccgtggcaggctttggccacagctgaaggagaggctgtgtctggcgtgtaccggtgcactggcgcctatagtgattatcttggcgccaaacaacacgcccgcatggagcatcaaaagcttcacgccacccagcaatctgaaaaacgcgcgattcgaagtcatcgccgtcgtagcgaagatatcgctcgtggtggagtgaaattagcgaaggcgcagggcatggcacgtaagttcttctctgaccgggcagaaaagaccgcgctgcgacgcacgcgtaacgacgatcaacgcttacacgatcttgctgaacatgaggtgcgaaaaccccgcaactaccaacttaagctcaaccttccaccagtcggctcgcgtggcgggttagccgtcacggcacgaagcgccttcattccaggcaggcttctcccaatcacgttcgaccttgccacgggggaacatttaatactgactggcccgaatggagcggggaaaaccacgctcttgaattggcttgctagtgggaaaacaacaatcgaccctagatccgaagccagcggcactatctctgtcagcgggcggcttgcttacgtcccacagcgcctaccacgcacaggagattcctactttcacccagaacattggaaagacgggatcagagaacttggcacgggaatactccacccatccatgtgggccaccccagtcggccaactttcagatggaaaccagcgtcgagcccagatcgcgttagccgtggcgcagaaacccgagattcttgtcattgacgaaccaaccaactacctcgacctcgccacgcttgaagaactagaggacgcgctacgccaatggaacggcacactcatcatcgccagtcacgaccgctggcttatcaaccactggcagggaacacaaatcgaattatgccccacagatccagcgcccggatcaccgaatcccctcttactcgttaagagccggttcgagccgtggtagtgccgtccttgagtgtgagtttgatagcgccgtcgtggttgacggtggtgtgatcgacgagggtgttccaggcttggtcggagtattcgagtggtggttgggtggcaaggtagtcgcgtacttcgattgcttgtgctcggcggtggcgcagatcgtcgatctggtcgctgatccgttgatgctcggcctcaagttggtggtgccgatcttcaagctcgtggtaacggcggtcgtagtcgtcagggtcgtgggcggtcgtggctgcggggtgatgagttggttcatcagcgtgatggtttcttcgatccgctcccccagcgtggcctgcttggtttcgagctcgcgggtgtcgtagacggtttcgtcgagcaggcgcatggtgtcatcgagcacgtcgttgccggtgacccgcttagccagggctgcgacgaaggcgtctttgatctggtcttcggtgacgtggggtgtcgcgcagtgatgatccttgttgtatttgttgttgcagcgccagatgtagcggcggtatttgctggtggagtgccagactttccgcccaaacctcccgccgcaatcggagcaggtgatcgtgttggcgaaggggtgggtgttggaggtgcctttgcctgcgcggcgggcgagttctgcttggacggtgtcccaggtgacgggatcaatgatgggttcgtggttgctggtgacgtagtactggggtacttcgccttcgttgattttcatggtttggttaggaagtcggtggtgaagctcttttgcagcagcgcgtcgcctttgtatttctcgttggcaaggatcgaccgcacagtggagggcgaccagatttgtttgccacgcggggtggggatgccatcggatgtgaattctttggcgatggtttgtggggttgcgccttcgaggaagcgggcataaatacgacggacggttggtgcttgggtttcgtcgatggcgaggttgccgtcttcgcctttcttgtagccgagcagggacgcgtaggacaccatgattttcccgtcggcgaagcgtttacggtggtcccaggtgacattctcggaaatggagcgggattcttcttgggtgaggctggacatgatggtgatgagtagttcgcctttggaatcgagtgtccagatgttttctttttcgaagtagacctctacgcctttgtctttgagctggcggacgtggatgagggtgtcgacggtgttgcgggcgaaccgggacacgctcttggtgaggatcaaatcgatttttccggcgagggtgtcggcgatcatggttttgaagccttcacggtgtttggtgctggtgccagtgatgccttcgtcggcgtacatgcctgcgaattcccactctgtgcgggattggatgtggctcgtgtagtagtcgatttgtgcctcgtaggaggaggcttgttcttccatctcggtggatacccgcgcgtaggccgctaccctgcgccgacgccgagtaccctgcaccgtggtgtgtccgggtatttttgtggctgggatcgcggtgacacgcttgttccgaatctgcttggtggtcatatcgcactttcctcgtccaggctcaccgccactggcacttcgccgctaatggtgtggatggtgagcgtacgatcgggattgacaacgattttcacgaggcgcgtcagcgcatactcgtcgtcccagtcgtcgaggccaagcacgcgggtgcagatctgggtgagatgggtttctcggatttgtggtgcctggcagggattgcctttacctttggtggcggtttcgcaccaccaaaacttgtaggacgtgtggcggcgtgtcttggtgcggcggtgataaaacctgctacagacagagcattcaatccgagaggtgagcccggtcgttctagctgacggcgtggctccacgtccgagatgtctgcgccgggcgagctcggcctggacggcgccgaacgtggtctggtcgatgatgggcgggtgggattcgtcgacgaggtagcgtggcagctcgccggtgttggtatggcagttcaattctgcaacgtttggccggtaatacttttgcaggattacgcggccggtgtagatttcattttcgagccatttgcggatcgtcttaccgcgaaacttggctccccgcctaggcttgaccccttcagcattcaactgactgatgatcttggcttcagtctcgatgatagccaagtcactacccacgtattggtagccgtagggttggcgcgaatgcatgagcccgtcggcgtatttcttccttatcccccatttaacattcttcgacatggatcgagattcctcctgcgcaaacgatgccagcagggtcagcaggagttcaccgtcagcggtcgcggtatcgatctgttcacgctcgaaacgcactgagacgccgaggattttgagttcgcggacggcatcgagcaggtcgacggtgttgcgagtcagcctggatatcgacttcgtcaaaatcatgtcgatgtcgccggagcgggcggcggccatcatggtctggaacccctctcgacggacggtactggtgccggtgatgccttcgtcgatgaacacgcctgcatagtcccaaccaggggtggattgaatcagatgagagtagtacgacacctgggcggcaatcgaagatagctggcgttcgtgctcggtcgatacccgcgcataccctgctactcgtagccgacgtggcgtggcggggctaggtgggataactcgaaaactacgcgaggtcactccctgcttctctttcttctatggcgacaggtgttttggttgtatccatctacgctctaaacctgagtcttatccagtcgaacctgcagcaacaatgcccccactggcgcggttgcttcatgcccgatccgcgtaaggatcacgtggctttcgtttggggtgagtgcgccggtttcggtgagccgatcaataaaggcgacctggcgggcaagatcgacttcggcattgaacatggcacccgtcacggtctgccacctcgggtgctgaagcggtgcctgatatagcaggcatgcgagcaatacttacggtgcttgtttccgtaggcctcgaagctctcaccgcaagcaacgcaggtgaaggtgtatattgcccgccggttgagccgttcggggtgggcgtgctaccacgacaaacgacacacatccgaacagaacctttgccccgccaccgcagcttcaaaatgcccattacagtgttcgcatgccttagcaggctcaacatcaaccgccggatcgatgttgatgtcagctctgcgacagatcgacttcaccgtattgcgcgacatgcccaatctggtggcgatctgcccatacgatgcgcctcggcatcgcagctccacaactcgctcacgggtaatctcacgtgccatgacgcgctcctgctcaatagaaataaggtctctactgacagggcttcgacccaccccgatttataaccaccactgtcctggtgcgatgggaacaaaaatggccccgccaccacctcatgtagtgaggcagcgacggggcgaaacaggacagttttcatgagtcttggtttagtggcggagtttttcgttgacccggcgctggacggcgtcgtagttggatccgagtctgcgtcggcgttcgttgccgttgccgtattcgccgcggatgaccgcgtcagcgagcgcgtcaatgttcggtgccggcttcggtgtgggtgcgggtttcggtgccggcgcgggtgcgggcgtgttgccggtcatgtggtcgtaccagtactgggcgcgagccatataggcggcgtgctgagtaccggccagcgatgctgggcattcggtggctgagaagtttttgtgcccgaacacgttcttaccccaggtagggcggccgagcttgtaataccgacagatcgcggccaccaaatgtgcgccgttgtcgaggcaggcgtcagagattttccatgggttagaagaggcgtcggcgtgctcgataccaatgctggtggtattggctgcccagtttccggcgtgccaggcggtgtcgcggtcccacacgagctgcccgatccgcccggaggtttctacctggtagtgggcggaggcgggccgggtctgccacac

SEQ ID NO: 94 - DNA, 6363 bp, Propionibacterium acnes
  source 1..6363: mol_type = genomic DNA
gtgttgtggactctcggggtcagtctgtccgctcacttgagatggcttaacatttctgaccgacgccgaagtctacgaacgctgcgaaacgccaaccgacgcctttgcaaccaagccttcttcatcaagatctacatcgacgaagacgaccaactccgcgtcgagaacaaccgacctttcgaaatgctcctcgaccctcagatcaacgccaacgccctcacctgggcccagaacggcaacaaggcccgaatcgaaactaaggggttcgagccttgtgcgtggggttacttagacgttcattttgatacaaggatctgggtgggtgcacggaggggctaggtgggtgcattgcatcctgacaggagcgccgggtgagttctggttgactaccagcagcgtgttcggtatgctagaggatagttacgcgacagcgtccgttccaatttctgggagtgtgttaattccgatggtgctgtgatctccgttcggctacgccgagaagcgtccaaatgtttcgacggttttggggatcaatatgtctgctatcgaggtaatcaatctttctttttcattttccgctcagccactcttggataacgtttcattcagcgttggcgatagcgagcgcgcagtacttgtggggcctaatggctctggcaaaaccactctcctgcgcctgatacgaggagagctaaccccggatcgaggacatatcgccatcagtgatgcaggagatgcaggttcttgtcgcttcccttatgttcgtgacgccactggcacagttcaggactatctggacgacgtgttggctggcccatgggagttgctcactcgcttcgaccacgtgacgaagcaactatcggctgcccaaagttcagcgagtctcgctaaagagtacgatcacatactcaccagtcttactctggccgacgtatggtcgctcgaagctcgaatcgatgaagtgttagccggtttaggtctaggccagctgaccggacgcggtcgacagcgcgcactcggctcactctcccctggccaggcagtgcggctcgaactggcaggcatcattatggtcagaccagtaactctggtcttggatgaacccaccaatcatcttgatgacgaagccgtaggctttctgatccagcaaataacagattggccggggccagtgctcatggccagtcataatcgtgcgtttattgaagagacagccacggtcatctatgacctcgatattgccccgtggcaggctttggccacagctgaaggagaggctgtgtctggcgtgtaccggtgcactggcgcctatagtgattatcttggcgccaaacaacacgcccgcatggagcatcaaaagcttcacgccacccagcaatctgaaaaacgcgcgattcgaagtcatcgccgtcgtagcgaagatatcgctcgtggtggagtgaaattagcgaaggcgcagggcatggcacgtaagttcttctctgaccgggcagaaaagaccgcgctgcgacgcacgcgtaacgacgatcaacgcttacacgatcttgctgaacatgaggtgcgaaaaccccgcaactaccaacttaagctcaaccttccaccagtcggctcgcgtggcgggttagccgtcacggcacgaagcgccttcattccaggcaggcttctcccaatcacgttcgaccttgccacgggggaacatttaatactgactggcccgaatggagcggggaaaaccacgctcttgaattggcttgctagtgggaaaacaacaatcgaccctagatccgaagccagcggcactatctctgtcagcgggcggcttgcttacgtcccacagcgcctaccacgcacaggagattcctactttcacccagaacattggaaagacgggatcagagaacttggcacgggaatactccacccatccatgtgggccaccccagtcggccaactttcagatggaaaccagcgtcgagcccagatcgcgttagccgtggcgcagaaacccgagattcttgtcattgacgaaccaaccaactacctcgacctcgccacgcttgaagaactagaggacgcgctacgccaatggaacggcacactcatcatcgccagtcacgaccgctggcttatcaaccactggcagggaacacaaatcgaattatgccccacagatccagcgcccggatcaccgaatcccctcttactcgttaagagccggttcgagccgtggtagtgccgtccttgagtgtgagtttgatagcgccgtcgtggttgacggtggtgtgatcgacgagggtgttccaggcttggtcggagtattcgagtggtggttgggtggcaaggtagtcgcgtacttcgattgcttgtgctcggcggtggcgcagatcgtcgatctggtcgctgatccgttgatgctcggcctcaagttggtggtgccgatcttcaagctcgtggtaacggcgggcgtagtcgtcagggtcgtgggcggtcgtggctgcggggtgatgagttggttcatcagcgtgatggtttcttcgatccgctcccccagcgtggcctgcttggtttcgagctcgcgggtgtcgtagacggtttcgtcgagcaggcgcatggtgtcatcgagcacgtcgttgccggtgacccgcttagccagggctgcgacgaaggcgtctttgatctggtcttcggtgacgtggggtgtcgcgcagtgatgatccttgttgtatttgttgttgcagcgccagatgtagcggcggtatttgctggtggagtgccagactttccgcccaaacctcccgccgcaatcggagcaggtgatcgtgttggcgaaggggtgggtgttggaggtgcctttgcctgcgcggcgggcgagttctgcttggacggtgtcccaggtgacgggatcaatgatgggttcgtggttgctggtgacgtagtactggggtacttcgccttcgttgattttcatggtttggttaggaagtcggtggtgaagctcttttgcagcagcgcgtcgcctttgtatttctcgttggcaaggatcgaccgcacagtggagggcgaccagatttgtttgccacgcggggtggggatgccatcggatgtgaattctttggcgatggtttgtggggttgcgccttcgaggaagcgggcataaatacgacggacggttggtgcttgggtttcgtcgatggcgaggttgccgtcttcgcctttcttgtagccgagcagggacgcgtaggacaccatgattttcccgtcggcgaagcgtttacggtggtcccaggtgacattctcggaaatggagcgggattcttcttgggtgaggctggacatgatggtgatgagtagttcgcctttggaatcgagtgtccagatgttttctttttcgaagtagacctctacgcctttgtctttgagctggcggacgtggatgagggtgtcgacggtgttgcgggcgaaccgggacacgctcttggtgaggatcaaatcgatttttccggcgagggtgtcggcgatcatggttttgaagccttcacggtgtttggtgctggtgccagtgatgccttcgtcggcgtacatgcctgcgaattcccactctgtgcgggattggatgtggctcgtgtagtagtcgatttgtgcctcgtaggaggaggcttgttcttccatctcggtggatacccgcgcgtaggccgctaccctgcgccgacgccgagtaccctgcaccgtggtgtgtccgggtatttttgtggctgggatcgcggtgacacgcttgttccgaatctgcttggtggtcatatcgcactttcctcgtccaggctcaccgccactggcacttcgccgctaatggtgtggatggtgagcgtacgatcgggattgacaacgattttcacgaggcgcgtcagcgcatactcgtcgtcccagtcgtcgaggccaagcacgcgggtgcagatctgggtgagatgggtttctcggatttgtggtgcctggcagggattgcctttacctttggtggcggtttcgcaccaccaaaacttgtaggacgtgtggcggcgtgtcttggtgcggcggtgataaaacctgctacagacagagcattcaatccgagaggtgagcccggtcgttctagctgacggcgtggctccacgtccgagatgtctgcgccgggcgagctcggcctggacggcgccgaacgtggtctggtcgatgatgggcgggtgggattcgtcgacgaggtagcgtggcagctcgccggtgttggtatggcagttcaattctgcaacgtttggccggtaatacttttgcaggattacgcggccggtgtagatttcattttcgagccatttgcggatcgtcttaccgcgaaacttggctccccgcctaggcttgaccccttcagcattcaactgactgatgatcttggcttcagtctcgatgatagccaagtcactacccacgtattggtagccgtagggttggcgcgaatgcatgagcccgtcggcgtatttcttccttatcccccatttaacattcttcgacatggatcgagattcctcctgcgcaaacgatgccagcagggtcagcaggagttcaccgtcagcggtcgcggtatcgatctgttcacgctcgaaacgcactgagacgccgaggattttgagttcgcggacggcatcgagcaggtcgacggtgttgcgagtcagcctggatatcgacttcgtcaaaatcatgtcgatgtcgccggagcgggcggcggccatcatggtctggaacccctctcgacggacggtactggtgccggtgatgccttcgtcgatgaacacgcctgcatagtcccaaccaggggtggattgaatcagatgagagtagtacgacacctgggcggcaatcgaagatagctggcgttcgtgctcggtcgatacccgcgcataccctgctactcgtagccgacgtggcgtggcgggtctaggtgggataactcgaaaactacgcgaggtcactccctgcttctctttcttctatggcgacaggtgttttggttgtatccatctacgctctaaacctgagtcttatccagtcgaacctgcagcaacaatgcccccactggcgcggttgcttcatgcccgatccgcgtaaggatcacgtggctttcgtttggggtgagtgcgccggtttcggtgagccgatcaataaaggcgacctggcgggcaagatcgacttcggcattgaacatggcacccgtcacggtctgccacctcgggtgctgaagcggtgcctgatatagcaggcatgcgagcaatacttacggtgcttgtttccgtaggcctcgaagctctcaccgcaagcaacgcaggtgaaggtgtatattgcccgccggttgagccgttcggggtgggcgtgctaccacgacaaacgacacacatccgaacagaacctttgccccgccaccgcagcttcaaaatgcccattacagtgttcgcatgccttagcaggctcaacatcaaccgccggatcgatgttgatgtcagctctgcgacagatcgacttcaccgtattgcgcgacatgcccaatctggtggcgatctgcccatacgatgcgcctcggcatcgcagctccacaactcgctcacgggtaatctcacgtgccatgacgcgctcctgctcaatagaaataaggtctctactgacagggcttcgacccaccccgatttataaccaccactgtcctggtgcgatgggaacaaaaatggccccgccaccacctcatgtagtgaggcagcgacggggcgaaacaggacagttttcatgagtcttggtttagtggcggagtttttcgttgacccggcgctggacggcgtcgtagttggatccgagtctgcgtcggcgttcgttgccgttgccgtattcgccgcggatgaccgcgtcagcgagcgcgtcaatgttcggtgccggcttcggtgtgggtgcgggtttcggtgccggcgcgggtgcgggcgtgttgccggtcatgtggtcgtaccagtactgggcgcgagccatataggcggcgtgctgagtaccggccagcgatgctgggcattcggtggctgagaagtttttgtgcccgaacacgttcttaccccaggtagggcggccgagcttgtaataccgacagatcgcggccaccaaatgtgcgccgttgtcgaggcaggcgtcagagattttccatgggttagaagaggcgtcggcgtgctcgataccaatgctggtggtattggctgcccagtttccggcgtgccaggcggtgtcgcggtcccacacgagctgcccgatccgcccggaggtttctacctggtagtgggcggaggcgggccgggtctgccacac

SEQ ID NO: 95 - DNA, 6363 bp, Propionibacterium acnes
  source 1..6363: mol_type = genomic DNA
gtgttgtggactctcggggtcagtctgtccgctcacttgagatggcttaacatttctgaccgacgccgaagtctacgaacgctgcgaaacgccaaccgacgcctttgcaaccaagccttcttcatcaagatctacatcgacgaagacgaccaactccgcgtcgagaacaaccgacctttcgaaatgctcctcgaccctcagatcaacgccaacgccctcacctgggcccagaacggcaacaaggcccgaatcgaaactaaggggttcgagccttgtgcgtggggttacttagacgttcattttgatacaaggatctgggtgggtgcacggaggggctaggtgggtgcattgcatcctgacaggagcgccgggtgagttctggttgactaccagcagcgtgttcggtatgctagaggatagttacgcgacagcgtccgttccaatttctgggagtgtgttaattccgatggtgctgtgatctccgttcggctacgccgagaagcgtccaaatgtttcgacggttttggggatcaatatgtctgctatcgaggtaatcaatctttctttttcattttccgctcagccactcttggataacgtttcattcagcgttggcgatagcgagcgcgcagtacttgtggggcctaatggctctggcaaaaccactctcctgcgcctgatacgaggagagctaaccccggatcgaggacatatcgccatcagtgatgcaggagatgcaggttcttgtcgcttcccttatgttcgtgacgccactggcacagttcaggactatctggacgacgtgttggctggcccatgggagttgctcactcgcttcgaccacgtgacgaagcaactatcggctgcccaaagttcagcgagtctcgctaaagagtacgatcacatactcaccagtcttactctggccgacgtatggtcgctcgaagctcgaatcgatgaagtgttagccggtttaggtctaggccagctgaccggacgcggtcgacagcgcgcactcggctcactctcccctggccaggcagtgcggctcgaactggcaggcatcattatggtcagaccagtaactctggtcttggatgaacccaccaatcatcttgatgacgaagccgtaggctttctgatccagcaaataacagattggccggggccagtgctcatggccagtcataatcgtgcgtttattgaagagacagccacggtcatctatgacctcgatattgccccgtggcaggctttggccacagctgaaggagaggctgtgtctggcgtgtaccggtgcactggcgcctatagtgattatcttggcgccaaacaacacgcccgcatggagcatcaaaagcttcacgccacccagcaatctgaaaaacgcgcgattcgaagtcatcgccgtcgtagcgaagatatcgctcgtggtggagtgaaattagcgaaggcgcagggcatggcacgtaagttcttctctgaccgggcagaaaagaccgcgctgcgacgcacgcgtaacgacgatcaacgcttacacgatcttgctgaacatgaggtgcgaaaaccccgcaactaccaacttaagctcaaccttccaccagtcggctcgcgtggcgggttagccgtcacggcacgaagcgccttcattccaggcaggcttctcccaatcacgttcgaccttgccacgggggaacatttaatactgactggcccgaatggagcggggaaaaccacgctcttgaattggcttgctagtgggaaaacaacaatcgaccctagatccgaagccagcggcactatctctgtcagcgggcggcttgcttacgtcccacagcgcctaccacgcacaggagattcctactttcacccagaacattggaaagacgggatcagagaacttggcacgggaatactccacccatccatgtgggccaccccagtcggccaactttcagatggaaaccagcgtcgagcccagatcgcgttagccgtggcgcagaaacccgagattcttgtcattgacgaaccaaccaactacctcgacctcgccacgcttgaagaactagaggacgcgctacgccaatggaacggcacactcatcatcgccagtcacgaccgctggcttatcaaccactggcagggaacacaaatcgaattatgccccacagatccagcgcccggatcaccgaatcccctcttactcgttaagagccggttcgagccgtggtagtgccgtccttgagtgtgagtttgatagcgccgtcgtggttgacggtggtgtgatcgacgagggtgttccaggcttggtcggagtattcgagtggtggttgggtggcaaggtagtcgcgtacttcgattgcttgtgctcggcggtggcgcagatcgtcgatctggtcgctgatccgttgatgctcggcctcaagttggtggtgccgatcttcaagctcgtggtaacggcggtcgtagtcgtcagggtcgtgggcggtcgtggctgcggggtgatgagttggttcatcagcgtgatggtttcttcgatccgctcccccagcgtggcctgcttggtttcgagctcgcgggtgtcgtagacggtttcgtcgagcaggcgcatggtgtcatcgagcacgtcgttgccggtgacccgcttagccagggctgcgacgaaggcgtctttgatctggtcttcggtgacgtggggtgtcgcgcagtgatgatccttgttgtatttgttgttgcagcgccagatgtagcggcggtatttgctggtggagtgccagactttccgcccaaacctcccgccgcaatcggagcaggtgatcgtgttggcgaaggggtgggtgttggaggtgcctttgcctgcgcggcgggcgagttctgcttggacggtgtcccaggtgacgggatcaatgatgggttcgtggttgctggtgacgtagtactggggtacttcgccttcgttgattttcatggtttggttaggaagtcggtggtgaagctcttttgcagcagcgcgtcgcctttgtatttctcgttggcaaggatcgaccgcacagtggagggcgaccagatttgtttgccacgcggggtggggatgccatcggatgtgaattctttggcgatggtttgtggggttgcgccttcgaggaagcgggcataaatacgacggacggttggtgcttgggtttcgtcgatggcgaggttgccgtcttcgcctttcttgtagccgagcagggacgcgtaggacaccatgattttcccgtcggcgaagcgtttacggtggtcccaggtgacattctcggaaatggagcgggattcttcttgggtgaggctggacatgatggtgatgagtagttcgcctttggaatcgagtgtccagatgttttctttttcgaagtagacctctacgcctttgtctttgagctggcggacgtggatgagggtgtcgacggtgttgcgggcgaaccgggacacgctcttggtgaggatcaaatcgatttttccggcgagggtgtcggcgatcatggttttgaagccttcacggtgtttggtgctggtgccagtgatgccttcgtcggcgtacatgcctgcgaattcccactctgtgcgggattggatgtggctcgtgtagtagtcgatttgtgcctcgtaggaggaggcttgttcttccatctcggtggatacccgcgcgtaggccgctaccctgcgccgacgccgagtaccctgcaccgtggtgtgtccgggtatttttgtggctgggatcgcggtgacacgcttgttccgaatctgcttggtggtcatatcgcactttcctcgtccaggctcaccgccactggcacttcgccgctaatggtgtggatggtgagcgtacgatcgggattgacaacgattttcacgaggcgcgtcagcgcatactcgtcgtcccagtcgtcgaggccaagcacgcgggtgcagatctgggtgagatgggtttctcggatttgtggtgcctggcagggattgcctttacctttggtggcggtttcgcaccaccaaaacttgtaggacgtgtggcggcgtgtcttggtgcggcggtgataaaacctgctacagacagagcattcaatccgagaggtgagcccggtcgttctagctgacggcgtggctccacgtccgagatgtctgcgccgggcgagctcggcctggacggcgccgaacgtggtctggtcgatgatgggcgggtgggattcgtcgacgaggtagcgtggcagctcgccggtgttggtatggcagttcaattctgcaacgtttggccggtaatacttttgcaggattacgcggccggtgtagatttcattttcgagccatttgcggatcgtcttaccgcgaaacttggctccccgcctaggcttgaccccttcagcattcaactgactgatgatcttggcttcagtctcgatgatagccaagtcactacccacgtattggtagccgtagggttggcgcgaatgcatgagcccgtcggcgtatttcttccttatcccccatttaacattcttcgacatggatcgagattcctcctgcgcaaacgatgccagcagggtcagcaggagttcaccgtcagcggtcgcggtatcgatctgttcacgctcgaaacgcactgagacgccgaggattttgagttcgcggacggcatcgagcaggtcgacggtgttgcgagtcagcctggatatcgacttcgtcaaaatcatgtcgatgtcgccggagcgggcggcggccatcatggtctggaacccctctcgacggacggtactggtgccggtgatgccttcgtcgatgaacacgcctgcatagtcccaaccaggggtggattgaatcagatgagagtagtacgacacctgggcggcaatcgaagatagctggcgttcgtgctcggtcgatacccgcgcataccctgctactcgtagccgacgtggcgtggcggggctaggggggataactcgaaaactacgcgaggtcactccctgcttctctttcttctatggcgacaggtgttttggttgtatccatctacgctctaaacctgagtcttatccagtcgaacctgcagcaacaatgcccccactggcgcggttgcttcatgcccgatccgcgtaaggatcacgtggctttcgtttggggtgagtgcgccggtttcggtgagccgatcaataaaggcgacctggcgggcaagatcgacttcggcattgaacatggcacccgtcacggtctgccacctcgggtgctgaagcggtgcctgatatagcaggcatgcgagcaatacttacggtgcttgtttccgtaggcctcgaagctctcaccgcaagcaacgcaggtgaaggtgtatattgcccgccggttgagccgttcggggtgggcgtgctaccacgacaaacgacacacatccgaacagaacctttgccccgccaccgcagcttcaaaatgcccattacagtgttcgcatgccttagcaggctcaacatcaaccgccggatcgatgttgatgtcagctctgcgacagatcgacttcaccgtattgcgcgacatgcccaatctggtggcgatctgcccatacgatgcgcctcggcatcgcagctccacaactcgctcacgggtaatctcacgtgccatgacgcgctcctgctcaatagaaataaggtctctactgacagggcttcgacccaccccgatttataaccaccactgtcctggtgcgatgggaacaaaaatggccccgccaccacctcatgtagtgaggcagcgacggggcgaaacaggacagttttcatgagtcttggtttagtggcggagtttttcgttgacccggcgctggacggcgtcgtagttggatccgagtctgcgtcggcgttcgttgccgttgccgtattcgccgcggatgaccgcgtcagcgagcgcgtcaatgttcggtgccggcttcggtgtgggtgcgggtttcggtgccggcgcgggtgcgggcgtgttgccggtcatgtggtcgtaccagtactgggcgcgagccatataggcggcgtgctgagtaccggccagcgatgctgggcattcggtggctgagaagtttttgtgcccgaacacgttcttaccccaggtagggcggccgagcttgtaataccgacagatcgcggccaccaaatgtgcgccgttgtcgaggcaggcgtcagagattttccatgggttagaagaggcgtcggcgtgctcgataccaatgctggtggtattggctgcccagtttccggcgtgccaggcggtgtcgcggtcccacacgagctgcccgatccgcccggaggtttctacctggtagtgggcggaggcgggccgggtctgccacac

SEQ ID NO: 96 - DNA, 6363 bp, Propionibacterium acnes; identical to SEQ ID NO: 95
  source 1..6363: mol_type = genomic DNA

SEQ ID NO: 97 - DNA, 6363 bp, Propionibacterium acnes
  source 1..6363: mol_type = genomic DNA
gtgttgtggactctcggggtcagtctgtccgctcacttgagatggcttaacatttctgaccgacgccgaagtctacgaacgctgcgaaacgccaaccgacgcctttgcaaccaagccttcttcatcaagatctacatcgacgaagacgaccaactccgcgtcgagaacaaccgacctttcgaaatgctcctcgaccctcagatcaacgccaacgccctcacctgtgcccagaacggcaacaaggcccgaatcgaaactaaggggttcgagccttgtgcgtggggttacttagacgttcattttgatacaaggatctgggtgggtgcacggaggggctaggtgggtgcattgcatcctgacaggagcgccgggtgagttctggttgactaccggcagcgtgttcggtatgctagaggatagttacgcgacagcgtccgttccaatttctgggagtgtgttaattccgatggtgctgtgatctccgttcggctacgccgagaagcgtccaaatgtttcgacggttttggggatcaatatgtctgctatcgaggtaatcaatctttctttttcattttccgctcagccactcttggataacgtttcattcagcgttggcgatagcgagcgcgcagtacttgtggggcctaatggctctggcaaaaccactctcctgcgcctgatacgaggagagctaaccccggatcgaggacatatcgccatcagtgatgcaggagatgcaggttcttgtcgcttcccttatgttcgtgacgccactggcacagttcaggactatctggacgacgtgttggctggcccatgggagttgctcactcgcttcgaccacgtgacgaagcaactatcggctgcccaaagttcagcgagtctcgctaaagagtacgatcacatactcaccagtcttactctggccgacgtatggtcgctcgaagctcgaatcgatgaagtgttagccggtttaggtctaggccagctgaccggacgcggtcgacagcgcgcactcggctcactctcccctggccaggcagtgcggctcgaactggcaggcatcattatggtcagaccagtaactctggtcttggatgaacccaccaatcatcttgatgacgaagccgtaggctttctgatccagcaaataacagattggccggggccagtgctcatggccagtcataatcgtgcgtttattgaagagacagccacggtcatctatgacctcgatattgccccgtggcaggctttggccacagctgaaggagaggctgtgtctggcgtgtaccggtgcactggcgcctatagtgattatcttggcgccaaacaacacgcccgcatggagcatcaaaagcttcacgccacccagcaatctgaaaaacgcgcgattcgaagtcatcgccgtcgtagcgaagatatcgctcgtggtggagtgaaattagcgaaggcgcagggcatggcacgtaagttcttctctgaccgggcagaaaagaccgcgctgcgacgcacgcgtaacgacgatcaacgcttacacgatcttgctgaacatgaggtgcgaaaaccccgcaactaccaacttaagctcaaccttccaccagtcggctcgcgtggcgggttagccgtcacggcacgaagcgccttcattccaggcaggcttctcccaatcacgttcgaccttgccacgggggaacatttaatactgactggcccgaatggagcggggaaaaccacgctcttgaattggcttgctagtgggaaaacaacaatcgaccctagatccgaagccagcggcactatctctgtcagcgggcggcttgcttacgtcccacagcgcctaccacgcacaggagattcctactttcacccagaacattggaaagacgggatcagagaacttggcacgggaatactccacccatccatgtgggccaccccagtcggccaactttcagatggaaaccagcgtcgagcccagatcgcgttagccgtggcgcagaaacccgagattcttgtcattgacgaaccaaccaactacctcgacctcgccacgcttgaagaactagaggacgcgctacgccaatggaacggcacactcatcatcgccagtcacgaccgctggcttatcaaccactggcagggaacacaaatcgaattatgccccacagatccagcgcccggatcaccgaatcccctcttactcgttaagagccggttcgagccgtggtagtgccgtccttgagtgtgagtttgatagcgccgtcgtggttgacggtggtgtgatcgacgagggtgttccaggcttggtcggagtattcgagtggtggttgggtggcaaggtagtcgcgtacttcgattgcttgtgctcggcggtggcgcagatcgtcgatctggtcgctgatccgttgatgctcggcctcaagttggtggtgccgatcttcaagctcgtggtaacggcggtcgtagtcgtcagggtcgtgggcggtcgtggctgcggggtgatgagttggttcatcagcgtgatggtttcttcgatccgctcccccagcgtggcctgcttggtttcgagctcgcgggtgtcgtagacggtttcgtcgagcaggcgcatggtgtcatcgagcacgtcgttgccggtgacccgcttagccagggctgcgacgaaggcgtctttgatctggtcttcggtgacgtggggtgtcgcgcagtgatgatccttgttgtatttgttgttgcagcgccagatgtagcggcggtatttgctggtggagtgccagactttccgcccaaacctcccgccgcaatcggagcaggtgatcgtgttggcgaaggggtgggtgttggaggtgcctttgcctgcgcggcgggcgagttctgcttggacggtgtcccaggtgacgggatcaatgatgggttcgtggttgctggtgacgtagtactggggtacttcgccttcgttgattttcatggtttggttaggaagtcggtggtgaagctcttttgcagcagcgcgtcgcctttgtatttctcgttggcaaggatcgaccgcacagtggagggcgaccagatttgtttgccacgcggggtggggatgccatcggatgtgaattctttggcgatggtttgtggggttgcgccttcgaggaagcgggcataaatacgacggacggttggtgcttgggtttcgtcgatggcgaggttgccgtcttcgcctttcttgtagccgagcagggacgcgtaggacaccatgattttcccgtcggcgaagcgtttacggtggtcccaggtgacattctcggaaatggagcgggattcttcttgggtgaggctggacatgatggtgatgagtagttcgcctttggaatcgagtgtccagatgttttctttttcgaagtagacctctacgcctttgtctttgagctggcggacgtggatgagggtgtcgacggtgttgcgggcgaaccgggacacgctcttggtgaggatcaaatcgatttttccggcgagggtgtcggcgatcatggttttgaagccttcacggtgtttggtgctggtgccagtgatgccttcgtcggcgtacatgcctgcgaattcccactctgtgcgggattggatgtggctcgtgtagtagtcgatttgtgcctcgtaggaggaggcttgttcttccatctcggtggatacccgcgcgtaggccgctaccctgcgccgacgccgagtaccctgcaccgtggtgtgtccgggtatttttgtggctgggatcgcggtgacacgcttgttccgaatctgcttggtggtcatatcgcactttcctcgtccaggctcaccgccactggcacttcgccgctaatggtgtggatggtgagcgtacgatcgggattgacaacgattttcacgaggcgcgtcagcgcatactcgtcgtcccagtcgtcgaggccaagcacgcgggtgcagatctgggtgagatgggtttctcggatttgtggtgcctggcagggattgcctttacctttggtggcggtttcgcaccaccaaaacttgtaggacgtgtggcggcgtgtcttggtgcggcggtgataaaacctgctacagacagagcattcaatccgagaggtgagcccggtcgttctagctgacggcgtggctccacgtccgagatgtctgcgccgggcgagctcggcctggacggcgccgaacgtggtctggtcgatgatgggcgggtgggattcgtcgacgaggtagcgtggcagctcgccggtgttggtatggcagttcaattctgcaacgtttggccggtaatacttttgcaggattacgcggccggtgtagatttcattttcgagccatttgcggatcgtcttaccgcgaaacttggctccccgcctaggcttgaccccttcagcattcaactgactgatgatcttggcttcagtctcgatgatagccaagtcactacccacgtattggtagccgtagggttggcgcgaatgcatgagcccgtcggcgtatttcttccttatcccccatttaacattcttcgacatggatcgagattcctcctgcgcaaacgatgccagcagggtcagcaggagttcaccgtcagcggtcgcggtatcgatctgttcacgctcgaaacgcactgagacgccgaggattttgagttcgcggacggcatcgagcaggtcgacggtgttgcgagtcagcctggatatcgacatcgtcaaaatcatgtcgatgtcgccggagcgggcggcggccatcatggtctggaacccctctcgacggacggtactggtgccggtgatgccttcgtcgatgaacacgcctgcatagtcccaaccaggggtggattgaatcagatgagagtagtacgacacctgggcggcaatcgaagatagctggcgttcgtgctcggtcgatacccgcgcataccctgctactcgtagccgacgtggcgtggcgggtctaggtgggataactcgaaaactacgcgaggtcactccctgcttctctttcttctatggcgacaggtgttttggttgtatccatctacgctctaaacctgagtcttatccagtcgaacctgcagcaacaatgcccccactggcgcggttgcttcatgcccgatccgcgtaaggatcacgtggctttcgtttggggtgagtgcgccggtttcggtgagccgatcaataaaggcgacctggcgggcaagatcgacttcggcattgaacatggcacccgtcacggtctgccacctcgggtgctgaagcggtgcctgatatagcaggcatgcgagcaatacttacggtgcttgtttccgtaggcctcgaagctctcaccgcaagcaacgcaggtgaaggtgtatattgcccgccggttgagccgttcggggtgggcgtgctaccacgacaaacgacacacatccgaacagaacctttgccccgccaccgcagcttcaaaatgcccattacagtgttcgcatgccttagcaggctcaacatcaaccgccggatcgatgttgatgtcagctctgcgacagatcgacttcaccgtattgcgcgacatgcccaatctggtggcgatctgcccatacgatgcgcctcggcatcgcagctccacaactcgctcacgggtaatctcacgtgccatgacgcgctcctgctcaatagaaataaggtctctactgacagggcttcgacccaccccgatttataaccaccactgtcctggtgcgatgggaacaaaaatggccccgccaccacctcatgtagtgaggcagcgacggggcgaaacaggacagttttcatgagtcttggtttagtggcggagtttttcgttgacccggcgctggacggcgtcgtagttggatccgagtctgcgtcggcgttcgttgccgttgccgtattcgccgcggatgaccgcgtcagcgagcgcgtcaatgttcggtgccggcttcggtgtgggtgcgggtttcggtgccggcgcgggtgcgggcgtgttgccggtcatgtggtcgtaccagtactgggcgcgagccatataggcggcgtgctgagtaccggccagcgatgctgggcattcggtggctgagaagtttttgtgcccgaacacgttcttaccccaggtagggcggccgagcttgtaataccgacagatcgcggccaccaaatgtgcgccgttgtcgaggcaggcgtcagagattttccatgggttagaagaggcgtcggcgtgctcgataccaatgctggtggtattggctgcccagtttccggcgtgccaggcggtgtcgcggtcccacacgagctgcccgatccgcccggaggtttctacctggtagtgggcggaggcgggccgggtctgccacac

SEQ ID NO: 98 - DNA, 20723 bp, Propionibacterium acnes
  source 1..20723: mol_type = genomic DNA
gtgttccagtgcctcgcgggcgtgatgttcttcttcggcaccttcttgccacatgcttcgcgcttcagcctcgccatccaagcgaacctggactgtgaacgagtcctcatcgggtccgtcctcattccacgcggcaatgatcccacgggcctcgtctgcgacctgactcaacttcatcgcctgcccgacagccccgagagccggaatctcgaacacccagatattcgcctcagccgagacctcacgatgggcgatcacttcgtaggtcgtctcaccttctactgtcgtgtccattacttccactccttcggaattttcacgcctgctcgctccagctgtgccaggacaccaactgacgtcagctggtgtcctgctggtatcgatacgcgcccggctccgccggggcgtccccagatttcatggcttcccttggcgttccgcagacgggcccatccttgagaacggagcagcttgaggacgtccttagttttctgcggtttcacacatcatagtatagccccacttaacttgtaaactaagcccctgtttacattttagttggtgcatgtgatccctgctcttatgacgtcgcccgacctggcgccttagacatgcactgttcatcctcaaccacactcaccgtcacgggtccgaaggcgaggtctatcaccattcgcatcgatgaagttgaagcaggatcgtccgcatcacgcactgccgatccggacagacgccaccggccgtaccgactgtttacgatctgccaccgcagactgctgccataaccgctatcacctctgatagtacttttagtactatcagaggtgattcaagattctcctgtcgagcagccctacagtcacgaagtcctgcgatcgtcatcgcttaaggcagacggatggccatcggggaccactcgcaaagcaggggcgatcagcaacagtgatgtgccatgagcaagtactggtgcaccggctgtttactccgcccctagataaaccacgggtgcaggggtggacaccacaccatgaccgatgtggtgcccaccccatggctcacaggcaggccctatcgccgggagcactgctgcagatgaggctcagtaacctgccatgtctcacctggggccaaggtgccaagctccccacggaatctcaggcatcggaaaccagcagccgaacttccacagcatgagcgccctacgaaaaagcaggccgccgacggttctcaagaactcgccggcggcctgcatcgccactcgaactgtaaccgtggtccgaccccgtgcacaggtaagctccacactcccaccaggcatggccgaggcagtaccaagttgccgtggcccatcggcagatttggttaaattttgaaaagtcatatagactccttctgtaaatttttaaatctcataggactctcgccatcgccagccagcttcgacaggagtcccgatgtttcaccgagtgaaatatcggcaccgtttgagttgacctaaagctcaaaagatgctagaatccatcttacctcgttaggggcgttttgtcaaacgcccctatattgcgtgtcttcgcgcgtcgtagcgctgatgctgcgcctgtgtcgactatccgtttgtaagtactttcgatgacaccagcagtggctactcatgactggtgcgtgcgggtctaaagcagcagggaaaggaatcgcagtagaagccgcttgattcctatcacccctgatggtactatcagtactaacagagcagggcttactcgatgcgtgagaatcggggacatgctgagcctctcgtaggtcattggcctgctgggcgtcagtgtggcgcggttcgatccagtgaactctatcagctctgttagtactgtcagagttgatatattcgaccccaggaggagcccatgagttacatcgttcgcaccggaaatttggtcgacacccccgagctgcgtgagggagagcatggccgtacacctacgctcgcgtcatcgtgtccgatcgcattcgccaggaggacggcagctacgtcaacgggccagcgatcgcctacgacgtcttggcgggtggcagccaagccgtgaatctggttgaagccgccaaggcgagcggcaacatccgcatcatgttcgcgggccgttaccgcgtcaccgagtggcggggtgagcagggcactcgtatccagcatgaggtccgagccgacgaggtgagcgtgagcctgctcggtcagagggtgaccgtggagcggcctcgaggtgacgtggcatccaaggagagcacgtcgttctgattgagtccgggggcacggtggtcgccgtggtaaaccgtgcccctgacagtactattgacactattggaggtatcagtgtgactgctcaaattttcgccttgtgcaaccagaagggtggcgtcggaaagtcgacatcgacgtttcatctggcccgtgccgcggtgttgcgtggccagcgtgtgcttgtcgtcgacaacgacccccagggcaacctgacgtctgtcgcggccgccgagcccgtgggggaggatcaggcggggctggccgatgtgctcagcgcgcgtgctccagagaccctccgcgatgtgatcgtgccgggaatctggtctggcctcgatgtcgtgccgacgtctggcatcacgctcggctgggtgcgtgacgaactcgtgatcgccggtgccggccgagaaggccggctgcgggaggccctggccggcgtcgaggacgactacgacgtgatcctgatcgactgtgctccatcgctcgatcagctcacgatcaacggcctggtggccgcccagggtgtcatcgtcgtgacgcactcgaagttgtggagcgccaacggcctcgcccagctgctcgacaccatcgacagcgtgcgcagctactacaacggcgcgctgcgcgtggcgggcatcatcgtcaaccagcacgaggagaacaccatcagcgggaaaacctggctcgacgagctgcatcaggctgccgagtcccggaagctgaccgtgcttgacccgccgatccccaagcgtgtcgtcatcgccgataccgtcgaggccgcgcgcggtctcgacgagtggggaagtgccgaggcggccgcgctcggccagttgtacgcccaccacctgacctgcatcgaaggagccctgtgatgacccgtccagccccccgaaagtcctcattgagcggatcaactccggtcgccccgccggctcagacggcgccggcaccgtctgccgcacctaccccccacaaggccgatgagtcacagacgagcagcaccacgaggaagtggcggcacaaggtgtcgttctaccaggacccggccgacaccgaccgggtgcgcggggcgatcctttacacgatgacgaccgagggcaaccggaacctgagccagttcgtcaacgatgccgtcatggccaaggtggtcgagctggaagtcaagtacaacgatggccagccattccccgctgtgggagcccgaggactaccccagggcggtgcagccgccgccggtgagtagaggaccatcgaccgtcgggggcttcaccatgcccccgaccctcggtcatcctgatcctcttgtcgatggtggtgacagtgggggattcacgcctcgttcagatcagaggaagtctcaccgcgtgattagtactatcaaatctgacagtactaacagagcagatagggttccctaggtcgagctgtatcacgccgacaaccagtgagccagtgatctacggggggcgcaatatgcacccgatcggtagccgcgaaggcctcgccctgccccgatagtactatcaccactatcaatggtgctagtggtgagtttcttccattgatgacaacagcacagtgctgccgtctgtgtgcgggccaccagcccgcacacagttgccgtcgaggacgttgttcatgctctgtggtggccggtcctgagggcggctcgcaggatctcccggcgctcacggcgacgagcctggtagccaaggtctgcatgttcggcggcgagacgggctttgagggttgcggcttctgcacggcggtggagttggtcgtcgatgagttgggcgcgggccagacgccgcttatgggggttgtcgtgggtgaggggggcgtcgaggctgccgtcgtgggttagggccagggctgctcgttcggcgtcgtcgaggccgatgtggtggacggtcacgggtgcggtggtgacgtcgaggatgtccaggtggatgttgtggccgccgccgggggcttcggggaagtctggtgggctggcctggccggtgtcggggtcataccaggacaggccgatgatctcggcccagggtgggggcgggcagacggctcgcagaagggtgtgggccaggaacgtgttgcgggccatgatgcctccaagggtgaaaagcagtcgagtagcgatgacggcggggtagccgtctgctgggctgaggccgaccgggcccatgtcctcgatgctcttgtgctgcggccataccccaaagctaccaaacagtctttttaatctcaaagatacaaacagtgcttgacatattatctgcagcgaaagatactttcatcatggtggctgatcatgattacgcgactcctgacgatgagtggatgacacctcctcaggtggcccgtgtgattccgaacaccactgctcaggctgtccggcgctgggctgaggagggtcagcttcctggggcgtttcgtactccttctgggcgttggcatattccgtggtcggctgtggtgggcatcatggggtttgatccgcgtgagtccgcatcaccgagtgatcgtcaccagagctgacagagtcgtcgatgagctttcgagtgcagagctgatggcacgacggtctggatacttgtggagatgagagacgactacatccagtcatggtcggggtacaccgaggggcagattcagcagtgctggcacgatgaggttgcccctgccattgactcgctcatggagcaggtaaggtctgttgccgagactcctgtgccgccgggttcgagattttacggcgatgagcagtgggccaagccttttcatccgtctactgcgatctgcggttcaatgggtccgccagcgatcacttgcacgcgctgaagctcctcgtctgggaagcgaacgtccaccatgtctatgcgccgtacacccttgctcgtgcatctattgaggcatcgtctactgctgtgtggctgttgagcacgaagacgcgcggagaacgtgtgctgcgagccttgcgatggtacgcgcaggattgtcacgactcgtgcaggttcatggatgatgagcagtatcgtgaccacctattgcggcgcattgaggggactgtcgctgcgggaaatctcgactcgcgcgctgctaggaaacggtaccgtgcaaccgatgttgtcgatgaggctgatcagctggttcccggaactctgagggcgtggcgagctttttctggtatggcccattcccgtatgtgggcatccagggggctgctcgacatggaagtgctgtccagtggccaaggaatggttacggcgaaggtgacgagcggatcggcccaaatcctttgggccgtcgtggcagctctgaatgttgctctcagtgccgctcgcttgtggcgtgattcgatgtgctcaccgtttgctgttgcccagtcggtagacgcgatgccagaggcgtttcgccgccctgtttagggtctgatcggggtagtgggtgttcacggggtcccaggttggccatggggcggcttggtgatgtgagttgggttgtgtggcagcctgggtgttgggtgtggcttcgttggccacgaaggcatgctcttccttgtgctgggacttgagtccccagtgctctcccctttgctagtggggggtggggtccccggaggtaggtcctccggggactttttctatgtctgtccgtgccccaggatttcgtatctaggcagtaccaattttgggttagttggaggtttctttggtaatggacagggtgagggtgatgaagaggtggccgtccttggtggcagaaattttctcgaacttcagctgaatgttgttatcagccactatctgttgggcggtgaggtgctcggagagcttctggaatccttcgcggatccacaggttgtaggggttggtgaccgagaccgaagggtatgggtcgaccttcagcgtcaggactggctggtctgggttgagggagttgatcttcaccagtttggggtaccggtcgcactcatgtgtctcttgtgttgggggccagcagtcgggggcccattcctcccagtggtcacgcatctcacgaagtactttcctgcatctcagcctctgcaggagctcgcgcgccaccgatgggagggctgccatgatgagggcaaggactgcgaacccgatgatgtaattgaccgtgtccctcgtcacgccgttcttgccgaggattccgatggcgaacgcgatgacgacaccgcccaggcacaggtgcatggggtcatgctgtgatggtttttcttcttcagcgactggtggggctatagtcatgtgtgccccttagtactaagtgatactggtgggttgcttttccccggtggccgtgtgcaagacggccaccggggttttccttcatgttcctgattttatctgcccggtgtggcgttttcatctttgtgtgggtggttcgcctggggtcttggagtgtggtgacgcggtgatggtcacggtgacggtgactgtggcgcgtggcgggtgaggtggttctttcctggtctggtgtgtggcccaggtgagtgtggtgatgagggccagggtgaggatgatgaccagggtggggagtagtttgtctggccggtgtcgccgggcttggtggcgcggcatgtttttccagggtgtgtctccgaacaggtcgtcgtcggaggggtcgtcgtggttcatagggtggccttggcgatggtggtgggcgagtttggtccaggtgatggtgccgtcggaggcgatgtggcggtcggcgggcagggtgtggacggtccatccggcgtcggtgagggcggtggtgaaggatttcttgatggatcgtttgggtaggtcgatgggggcgtgggtgccgacccagatgcaccggtttttgaggtgggtggcgccgaggtggttcatgtcgcggaccatgttttgggtgagtgtgagggtgtcggggtcccattggacggggatgatgatgtggtctgcgatggtgatggcgtgttgccaggcggcgtcgaggtcgttgtttccggtgtcgaggatgatgacgtggaagcggcttcttagggcggtgatgatgcggtcgaggtcgtcggcggtggggggtgtgatgaggctgttgtggttgtcggtgatggtgggtaggcatgtgatggtggcccagccttctggttgccaggagatgtaggggtcgaggtcgcggggttgggaggcgaatcctgggtgacgggctgcgcgggcgaggtcgatgacggtgttgtcggtgtggcggggtgcgcgggtggagagggtgccgcgtgggttgatttccacgacgacgatgtcgtcgtgtcctgctgtggtggcgagggcttgggcaaggatgacggccagcggggttttgccggtgccgcctttgaggttggcgagggtgatgatgtggtcggtgagttgggcgggtgcggcggtgtggtgagggttggcggtgaggttggcgatggtgaacagggcatcgagatcgtcggtggtgttctgctcggtgggttgggggtcgccggagatgatcgggtcggcgcggcgcggctgccatgccggcctcaccactgtcacgaccaccacgggtctgctggcgctgtgtgggtgtcgtcggcgatgactcacgatcggcagtctcaccatcgtctcggtgatgctcggctagcgctggacccggtcaagttcgggccggctcacccagtggtgatgactcggtcacagaaccgctgccggtcgttatctcggacgtctcgactcctccagtcctgatgggcgttggagccacctacacctactctcagaacgaccccgacctcgtgtggggcgggggcagatgtcacttgggccaatcgagagcccaggtgatggggaaagcaggggtgtgatatctgtcctggaaaactgggcagctgctaccgtggattgacggatctccacgaaagaagggaatgcgaccatgcagatcaccgtcaagaccatcaaagatcatcgggttcgcactgtccagaccgccatgagcagcgccttggggattggttcccaggtagacatgctcgcccccggcggttccaccagctcgagttccggttcatgctgctcgtgctcgacctgcgcggtagtggcgcagcctcaagactgaacggctggtcagccccaggggcgtggcgctcatcgcgtcacgccccttctattcgctggacagggtgcgcgagctgaggaacatcgcggtgtgtgcgatgacgaggggcaggagcaagtctgtgcgggttgccaagtagccctgcgcgatggccatcacgctggccccgacggcggcgaagacacctccgatacgtcgcttcatgccgccgaattgcatcaggacgaataggactcccgcggtccacatccctccgggcatgcatctgggaaagatgaaccggaagatgatctcttcacaggagagctggagtactagcagcgtagcccccacggggagactcacctctactgacagacggatcgtcttcatccacccacccgagctggcatcgaccatttcggtggccatgcgcgaccggtggcctcgtgcctctcgctgcgtgtcgatccagccgagcagtccgtggacgctctccgctaggactcctgacgcgacagtctcaccaattcctaagcccacggcgaggaccgcgacgcccccctgcacggcaggctgtgtgacttggtggtcccaccaacccgccggcaggaccatgcgtgcgaggctgcacacgagcaggaggtggagggtcacgacgagcgacatctggaataccgcttgccgttcggcgatggtggcgttgggaaagagcggtaggccggcacgggcagcggcgctcgacagcttccgcaagagcggtttggagacgaagtagtaggcgacgtacagcgccagcgctgtcgcgatgatgatcatcggtctgccaccgagctgacccgccgatagccgtttctgttccaccaatactggctgttgtagatcaggtggcccagaacacaggcccagatcccccagaagatgaacaggatagtccccaaggcggcgagcgggatcttggagaggacctgtccccgtccgaacaccgagtggccgcaagcaaacaagagtgctcccacagcggtgagcgcgagccaggccggggttgctcgcagactgatcaccgggaccccgacccggaagccgacctcttctcctacagcgatgactagcaactgccacagcggcatgttctgaacggagcgcgcgactcgggctcgagtcacccacacgggctgttgagcgctcacatcaccactcaggtaccccggtgaggcacttcgcttagtactggggcccgatgtgcgagcattcgtgatgtgtcgcaggatccggttgtcaagccaagaggccagcagggctccggcgacagtgacgggtagcccgatcagcacgaggccccagccatgcggtgccgagaggtttctggccggcgtgcacgcgaggcaggcaagtgccaacactgccagcactacgacgtagatggtcgcataattcgacttgcgggtgacgttgccgaccatcttggccaaagtcgctggggaccagctgatgagtgcgatggtggtcagcaggaagcaggaccagacagacatccggcgcactcaggggtatgggtgcggctgtgggttttggaaaccgccatatgcggcgtagcgggggtgtgcccgcatgggtgcgctgggcagtgacagggcgagcagcccaggcgcccagagcctgacacagtgcagtcccagcccctggatctctatggtggtgaaatcttcgatgtacaggggtgacacacaggtgatgctgttgaccacgctctttaccagttccgcccccgtgtgggtgtcgtcaggtggcaggtcttcggcttgggcaatggtgcccgcgtcgaatttcgccacaactgattgcgcggcctgatagttcctcgcgtagtaggagacgttcgagtcgaggtcaagcatgtcctccgtggacatactggacgcgtcggcctcggcgtcgaaagacgtccataccgcgagcatccgaaccccgctgcactcgagaaacgccttgtacatggctgcttccagacccgcgtctgcacctaggccgacggcgacgaggggaagttggttgccactaccgaccatcatgcatgccacggtgaaatgcttgagcccgggagtcggaagccagtagaaacgcagttcgtggcttcggcccgctgcacgttccacgagccgctggatgcgctggaggcggggtccttcgacgcggatgcgcacaggtgacgaggctccataccacaggcccatcgcggcatctacctggatcaattcataagccgcggacagcgttgcggcgacgcgtgaagtgtggacggcggtgccggtcgtcacggccgttcccagccacggctcaccgtcgtgccgacgggggttgtaacccaggtaaaagaactgcgccgggatccactcctgccgggaggtcccgacacggggagtcttgacccatgtcatgggcaagtcgtcgcgataggtgtcgaacgcacctccagccactcgttgcgcgaagccgaatgcgcccagatcgagaacttcgtcctcggtccgggcgaggagttcctgacgagtcgcccagcgccgttcgaagggactatggagaatcccggtacccgcgcagtagcgctcgacggcctccgcgtagaccttgatctctgcctcaaactcgttcagccccaccccaccgatgtggtagctacccggcttggggtcgggccggtcaagcagtgcgtgcatccccgtgagttccccaccgttcacccgcacgcgggggccgagcgcggggtgcagcgagtagccgacggaagtcaccagcccgcatagcgggctgtaggtgcgccgcctgagccgggctgcggtctcgacggggtcgctatcctggcgaagcttcatcgctcgccccctgccgccagccactcacggatgtcgtagtacaggtccggagcggtttcaacctgcgctggtgcatcaaaacgggacataggtaggacgtcgttgtaggcgatctccatcgtcggtatgtagaccgacaacactttgttgcgcgtcgtgttgaggccgttgcgggcgatgctgacagcctcatgcgcgacgtgcgcggccaagatcgcgcgcaccgacgctgccacggccggcgctccggcccttacgcggtcggcagcggccacccgcatccaggacaggtagctctgccgttcgcgcaggttcatcgcgacccgctgctcgaaggtccggtaggacgaggtcgcaccagggacgacgtagggacccacgtacaaggccggcccgtctacagctgcgtggagccacgacaggtgggcgcgtcgggcgaacaggtcaagggcgcgcagcatagccgggttgttctgcgccagcgctaccacaaggagtggctgcaggtccggcgccgaacccagcaacgccaacatctgggaggcctcctgctccatgtgcaactcgtcggccgactgctcaagccgcaggcctgcgaagagggtggctgatggctgcgtgtcgtcagcgaggacggtagcctgcagcccctctccctcgagaatctgctggatatcgccggcgaggagcgcgtcgtcgctgaatacccacaccgggcgcgtctctctacctccatccatcttgtcctcaacgttttcgaccagcgcaccgatcgatgctaggtgggccatcacgtcgtcaagggccgcgcgggtcaatccgggcacccgggacacgatctcgggcggctgcagtccttggctcaacaagtccaaggccggccacagggtcccggtggcgtcgtcgtcctccagcgttgtgctctcggcgttccagacgcctcgacggaactccaccctgtccatcgagtaaggcaccatcatgaggcccggtgaaatgtggttggtcagtttggctcctgtacagcctaggcttggacgcccacggtcatggtgtgggtcgcggtttggaaaatcccgtcgaggttgagtgcctgattgagttcgtcctcgtagaagcttgaggactcgactgaggcaagaccgagccccgtgcagaccaagttgatctgttgtgcgatcgccccgacttcttgaagggcgaacctcaaacccctggctccgtacttccgcatcgccctccacggcgagatgacgaacaccaagtgcactccggccgcatccgattgctccacggccggctcgccggccatcgaattcctcacgccgcgacagccctcttcaccggtcacgggcaccagtcgatcgatgaccggcgagtagcggtagacgccgcgactcaagccggacacccgttgtgcggacatgaagatagacacgggatacagccctccaccagacgggacagcgcgtacattataccgcacgatatcaccgctcgaacgtgggacatccacgtgccccgtcacaccggcagcacctctcagaaacgcagctacgtcacgcaggtctagggattcgccggtgtagttccgtccgctgcgccggcgggcgatcacttgctcgaggggtgcgcgcaccctgctggacctgggaagttcgatcacatcggcagcgaacgtgtcgcgatccatctgtccgtacgtaacgatcatggggtcaacgaaatagtcgccgaccgagacgttgaactccatatccccccgggcgatgcgcgaggcgagcaagaagtctgcagctgcgttagacagccccggcccatcagtgttgtcgcagcggaactcgtgggtccgaaaccccacaccttccgtgcccgggctctgcgctcgatacgacgtgatcgcagaactagccttccttaaaccgcccggagtagctaccatgaccgtcccctctgaggtctcccgaacacttgcgacaatagcagcatgtgggggcagccgccagaggcgggcatccttgtctcgacaaccattgacctccggattcgatatgtgcataatcatagtcgtgccaacacgaaacgtgtacgtctcggaagacgacctagacctgttcgccgaagccaccgagatcgctggaggcctgtccgcagcggtgttggaggccttgcgcagctacgtagacaggcaccatcgcgcggccggcggattcgacgagatcgagctggagctgcagaacgacggtatcgaccaccgtgtcaccttcatgggtcgccgcctgatacacatccgccgtccagatcccgagggaacccgcatagacactgtctacttgaccgccaaacaccaattcgccgttgccaccaaaatccaacgacggctgccagactggacgaccggccacgagcacatctggtccgacccggagacctggaatcgggagttctggatcgcaggtgacaagacgatggccgtgtatcccagccttgacaaactccgcgaagctgaccccaatgtggccgaacgcgccgaggccgcggtcaaaatcccgccgttcgaggtcctggacatctgatgacagaatcatcatcttcccggcggcaattggcaatgccggtgctgtcagtcacggatctagccaagaaatacgtggttcatggcggctacgaggtcccggcactcaacggtgtctcgtttgacctgcacccgggagagatgctgggtttgttcgggccaaacggtgctggaaagacgacgctggtcaggatcatcgcgggcctcttatcggcagattctggagacgtccactggggatcggatcaaggtcgggccaggttaggctacgtgtcccaaaagggtggactgcagtacgggctcacgtgccgggaagagatggtcttccacgcacaatgcttcggccagtccgccaagcaggcccggactagcgtcgacgaggtcgccgcgatgctgcactgcgattacctgatggagtgggacgtcggaaggctctccggtgggcaacgccgaatcatcgaggtagggctagcactcgtcaatcaaccatcggtcgtcctgctcgacgagcccaccctgggcctggaccccgcaacacgcctgtcgttgtggcaaacggtaaagtcggcacgccgtgagaccggtgctgccttcctcgtcaccacccactacattgacgaggtggccgagcacctgtccaacgtcagcgtgatcaaccacggaaccgtcgtcgccaacggctcgccagcgcacatccgagaaatgttcgcgaccggggaagtaacgctcggcgtggccgaggatacggtggacagtgcggtggacgtgttggctgggaccgcgttcgaggcgcaccccaccgaaaccgtcccggggatcgtggtcaggtccaggcatcccgacgtggacgcggccaagatcatcaccatcctggctggtcatggcatctcggtggactccatatccgtacgcgaggcgaccttggaagaggcgtttctcacgatcacaggcagtcgagacccggagaggcaaatcccatgaacacttgcttcaggcgatatgcggcgatgtcgctgagagcgcggcgtgatttggccctgacattcatccagcccctcgtctacctagccctcttcggaccgctcttcgtcacgacgatgaagatgtcgcagagagctaccgccgctacgggttactccctatacatcacgggcctgtccatccaaatggccatgacgatcggtgccttcgcggggctaaccatcatcctcgaataccgactcggcatcctcgaacggatctggagcacccccctcacggggagcaagatgatggcggggcgaatcgcgcgcgacgtcgttatgatgatgatgccgatactggtcgtcttcatcatcggcctggtgctgggaacacgccccagcccactgggcctggcgacctacttcgtgacagtgctcggcacaggagccacgttcgccggggtctcctacgcggtggcactcagaacgaagagcgaggcagcgctatccgcgatcttcaacctcatcctgctacccgtcctcctgctgtcggggatcatgctgcccatgtcgttcgcaccacactggatcgccaccgctgcccacgtgaacccgttgtggtacctggtgcaaggcgcgcggaaccagttcagcgttctagggctcgtggcggcggccccatggagttgggctgtggccatcgtcatgtcagccgctgccttcggctgggcaagccacgaattcaacaagaggcgctgacacaaagaatggtgccgggaacccaggtccccggcaccaccgagtgcactcgcgacgtcaacgcaccgttgcggtcactgcgcaggtcgagcacgaggacgacgagcccgcgctgctgcaggtcgagccgccaggcgcgagcaggtcgacgttagcgtcggcgccgccgaagacggacgtgacggccggctgagaggtgcggatgcggtgctccagcgaggaggtggtggtgagtttcatgggaggtgctcctaggagtgagacgagaacaaaccctagcgataggttagcagtccgcaaccgactccgggaatagtagaagcgcgcatccgtagcggaagaccttagcctgattacagtgaccctgttcgcgtctcaacattattccacacccccgagcagcgaacgacaccgcgatgatgatccgtcgcctctccaccgaagaactccgcgcccacatcgcaccgggccgccgtcccgtgcatcagacctgccgtcaacgtcggccatgaagctgggaaggtggctctcgtctaggagcagacgcgggacgcctcctccaggttgggccggggaagtgtccggttcttgatgtaggtggcggtccctattgatgggcgttgaccgtgggaatgcggtcggcgaagggggtggcgaacccgttgagcgcaggcttccagcgcatgcatcaacgctgtctgccggccaccggcaagcctcacccgcccgtcatggccatcatcgaggtgccggtgaatcctcgacacatgatcccaactcccccggaggggcttccggggctgttcagccaccagatcagccaggcggcgagcccgactctgccacccggaccctgcagagcgtgcctgctgccgtcgtgtcgtgtcgggccagtgggccaccagatcggccacatccgtcttggcccatctccagcccgccagacccagggaggccatcacctcatcgacgccgcgccgggtggtctcatcaaccccgtcaaacagctcgggccacctcgatgatgccgtccgtgaacgatccagattcatgacatgctcctcttcacagatgccgacgacgatcaggccgtggccgtggcaacggggtgacctgccggcgcggctcacgacgttgagccggaaccacacgagacgcaccagtgtgctgcgccgtcttgagtcgggcgctgtactgggccctggcgctgtggtgaacagcccgacgaagcaccgaccgccggctgtcctcatcgccagggcgaggcatggggcgcggcatggtgcgcccggtagcagcatccatgagggtgatccggtcagccaaaatgccgagccggttttcccacttccggggccacggcaccagcaggtcacgctgacagcccacgccgtggcgtcggcagtccacaacattttctcacggccaggatgcgagtgcagcagctccaccggaacaccagcatcacgcacccgccgcatcgtgacctcatcctcacgtgccaccagcgggggagagcgactaccgctgcagccggtccaaagcgactcttcacagatgagggggtggatcggtagctgacccctaggtcctgatgtgggtcgaggtccttggaatgatggaagttcctacacacccatcgccaaagacctcaacatggacaacgctaccttcaccactccctcatctgtgaagagccagtttatgcacggtgttgaaagaggcgtcggtctacgacgaatgcgggttaatggtcttgcggtgtggggcgctgggcgatggcatcgagaacgcgtgagtgggtggcgatccattcggccgcgtcggggttgatgttgcgggcgacggtgtcgatcgctgttacgtagtgggcaagcctgcgaatctcagcttgttggtcagggtgagcgctgatgaggggctcttgatgggaggcgcggttacggacgtggcggatgagctccacgttttcctcgaagtcgcgtcggctacgccccgggtagtgaggcatacctccgttacgtaagtcagtgagagctttccatacggttgcttccaggcgcggggtgagcagaaagcgccagttgtccagtgacagactcgccacgatctgatcaggggtcgcatcgagcctcgcgcgccgcagtcgcttctcggccctgtcgacgttacgcgggaaaccaccgagccgatagctcggggattcccaccaacgccgtatgccagtatcggcgctcaggcgcacgtcaatgaagtttctcaggagtacctcgacatggctgatgtcttccaagaacgctttcgagatgcgggtgttccacacgtaccacgcatcgactggttcgatccggtagcggctgagcctggcgggtgagaaccactcctgcaacgtctcacgactcaccgtgggagcgtggtaggattgatgacgataggcctcgggaaggtcaatgccgcgaaatatcggtatacccccgaggccattgttttgcccaggcccctcctcgcatacttgcggggcgtcattggctgccgtcatctcgtctcttcccggtacgtggctgtccatgttcacgggcaggtacggcaatgaggttcccgcacacaaacctctaccaagcatacgctggcaagcccccctctcggccccaccacaacatcaattgctgactcgaacacctttgaggcagcgctttcggcttgcgcaaccccatccacgacaccgtccgcttactactcgaagctgagggattcagaccccacctacaccctcgattgtgaagagcctccaaagcccgatacaacgtctggcgagacaccgtgaacgacctcgccaccgcagcaacgcaccagcagcgcgggatggcttggtattagcccagcgcagggccccaggcaccagccctaacgaccccgcacccgacgtggctagaggataagccgcacgggaggactccatacccgccgactcattccagcccgccaccagccgagccatatgatcaaccgcccgcggtaaataatccagccactcacgccggtcgtataaggaaccggccccgctccaggcgtgtgcccaggatcgccacaacacgtcgagctcgaccaccacgcccggaatagattcccactccaaatccggatcagcggccgccacgtaccagatcggccacatccgtcttggcccatctccagcccgccagacccagggaggccatcacctcatcgacgccgcgccgggtggtctcatcaaccccgtcaaacagctcgggccacctcgatgatgccgtccgtgaacgatccagattcatgacatgctcctcttcacagatgccgacgacgatcaggccgtggccgtggcaacggggtgacctgccggcgcggctcacgacgttgagccggaaccacacgagacgcaccagtgtgctgcgccgtcttgagtcgggcgctgtactgggccctggcgctgtggtgaacagcccgacgaagcaccgaccgccggctgtcctcatcgccagggcgaggcatggggcgcggcatggtgcgcccggtagcagcatccatgagggtgatccggtcagccaaaatgccgagccggttttcccacttccggggccacggcaccagcaggtcacgctgacagcccacgccgtggcgtcggcagtccacaacattttctcacggccaggatgcgagtgcagcagctccaccggaacaccagcatcacgcacccgccgcatcgtgacctcatcctcacgctgccgatcaccgtcaaccagatggtcagccacgatggtgttcacaccccatgactcatgcagttgcctggccaaggcgcccaacacctgctgacgcacctgtgacttgacgtcatcatcctccagatcctgtgtaccaaccatcacggaggccaacacatcactgcgttgctgaaccagggtgttgacgacgtcgacatcgtcgatacccatgggattgttggcgcgcgcggccacggcatgaaacgtgttggactgcaaattctcgaccagaccacgccgatagtcgttgaactgggaggtgtcggcaatgacaccggtcatgatgtaggccgacccctcggacaaggccctgtaggactcgtcgacgaacgccaccaaccccggccgccgccggtaaagtcgacctgcttcctcgtcagccagcaaccatgacagtttttgccccatatgtcctccttgctgacatgacctcgaacatggtaaactttccgtaggaaaaacggggcaagtactttcgagcggctacctcggcccccggtggaatgtccagccttgtgcggaccgaagccgggggattccttatgtttgcggcaatgatgccgctgcaccccctcatgccgtggtgtggtcctttccccgtgtgcggtgtggtgcgtcgttgactggtttgtggccccgagccttactctgaccggtaggagaacggtgtggggtctacggatagcccactcggctcccggtggaatgtccaacagggtagggttgatgagttggtccatcaggaccgtcccggtggctgcgtcaatgatcgatatttcgatgatgcgcccgtccaggtcggtggtttcggtgtcgaggatgactccgactccgggttctaggagttggggatccaatgggtggtcatcgtgtggctcctacagggagtgtctgggctggacagcggtgcaatacccgcgccatagcggttttttctgcgggggtgacccacagctggtatttcgttttgacggcgatttggcgggccacgtagtcgcatctgtaggccttgttagggggtagccaggtcgctgcatccctgtctcgtttggcctcattagcgggtccgtcgacagccagcaagttcaacgggtcgttggccagggcggtgcgttgcagcggtgagagtttttgcgcgccggtaatccacgcgttcccgagggctacgacgtggtcgatttggactgttgtcgaggtgtgccggccgcgccgccaggcgagtgtggacccggtgtaggggtcgtggagtcgcccggagacgaccacgcatcgtgatccgggtttcaggtgggcctcgaccaggtcgcgggcaagggcatcgttgcgggtgtcgcatccgttgtggccccaggggcgggtcaa

SEQ ID NO: 99 - DNA, 17173 bp, Propionibacterium acnes
  source 1..17173: mol_type = genomic DNA
gtgttccagtgcctcgcgggcgtgatgttcttcttcggcaccttcttgccacatgcttcgcgcttcagcctcgccatccaagcgaacctggactgtgaacgagtcctcatcgggtccgtcctcattccacgcggcaatgatcccacgggcctcgtctgcgacctgactcaacttcatcgcctgcccgacagccccgagagccggaatctcgaacacccagatattcgcctcagccgagacctcacgatgggcgatcacttcgtaggtcgtctcaccttctactgtcgtgtccattacttccactccttcggaattttcacgcctgctcgctccagctgtgccaggacaccaactgacgtcagctggtgtcctgctggtatcgatacgcgcccggctccgccggggcgtccccagatttcatggcttcccttggcgttccgcagacgggcccatccttgagaacggagcagcttgaggacgtccttagttttctgcggtttcacacatcatagtatagccccacttaacttgtaaactaagcccctgtttacattttagttggtgcatgtgatccctgctcttatgacgtcgcccgacctggcgccttagacatgcactgttcatcctcaaccacactcaccgtcacgggtccgaaggcgaggtctatcaccattcgcatcgatgaagttgaagcaggatcgtccgcatcacgcactgccgatccggacagacgccaccggccgtaccgactgtttacgatctgccaccgcagactgctgccataaccgctatcacctctgatagtacgtttagtactatcagaggtgattcaagattctcctgtcgagcagccctacagtcacgaagtcctgcgatcgtcatcgcttaaggcagacggatggccatcggggaccactcgcaaagcaggggcgatcagcaacagtgatgtgccatgagcaagtactggtgcaccggctgtttactccgcccctagataaaccacgggtgcaggggtggacaccacaccatgaccgatgtggtgcccaccccatggctcacaggcaggccctatcgccgggagcactgctgcagatgaggctcagtaacctgccatgtctcacctggggccaaggtgccaagctccccacggaatctcaggcatcggaaaccagcagccgaacttccacagcatgagcgccctacgaaaaagcaggccgccgacggttctcaagaactcgccggcggcctgcatcgccactcgaactgtaaccgtggtccgaccccgtgcacaggtaagctccacactcccaccaggcatggccgaggcagtaccaagttgccgtggcccatcggcagatttggttaaattttgaaaagtcatatagactccttctgtaaatttttaaatctcataggactctcgccatcgccagccagcttcgacaggagtcccgatgtttcaccgagtgaaatatcggcaccgtttgagttgacctaaagctcaaaagatgctagaatccatcttacctcgttaggggcgttttgtcaaacgcccctatattgcgtgtcttcgcgcgtcgtagcgctgatgctgcgcctgtgtcgactatccgtttgtaagtactttcgatgacaccagcagtggctactcatgactggtgcgtgcgggtctaaagcagcagggaaaggaatcgcagtagaagccgcttgattcctatcacccctgatggtactatcagtactaacagagcagggcttactcgatgcgtgagaatcggggacatgctgagcctctcgtaggtcattggcctgctgggcgtcagtgtggcgcggttcgatccagtgaactctatcagctctgttagtactgtcagagttgatatattcgaccccaggaggagcccatgagttacatcgttcgcaccggaaatttggtcgacacccccgagctgcgtgagggagagcatggcccgtacacctacgctcgcgtcatcgtgtccgatcgcattcgccaggaggacggcagctacgtcaacgggccagcgatcgcctacgacgtcttggcgggtggcagccaagccgtgaatctggttgaagccgccaaggcgagcggcaacatccgcatcatgttcgcgggccgttaccgcgtcaccgagtggcggggtgagcagggcactcgtatccagcatgaggtccgagccgacgaagtgagcgtgagcctgctcggtcagagggtgaccgtggagcggcctcgaggtgacgtggcatccaaggagagcacgtcgttctgattgagtccgggggcacggtggtcgccgtggtaaaccgtgcccctgacagtactattgacactattggaggtatcagtgtgactgctcaaattttcgccttgtgcaaccagaagggtggcgtcggaaagtcgacatcgacgtttcatctggcccgtgccgcggtgttgcgtggccagcgtgtgcttgtcgtcgacaacgacccccagggcaacctgacgtctgtcgcggccgccgagcccgtgggggaggatcaggcggggctggccgatgtgctcagcgcgcgtgctccagagaccctccgcgatgtgatcgtgccgggaatctggtctggcctcgatgtcgtgccgacgtctggcatcacgctcggctgggtgcgtgacgaactcgtgatcgccggtgccggccgagaaggccggctgcgggaggccctggccggcgtcgaggacgactacgacgtgatcctgatcgactgtgctccatcgctcgatcagctcacgatcaacggcctggtggccgcccagggtgtcatcgtcgtgacgcactcgaagttgtggagcgccaacggcctcgcccagctgctcgacaccatcgacagcgtgcgcagctactacaacggcgcgctgcgcgtggcgggcatcatcgtcaaccagcacgaggagaacaccatcagcgggaaaacctggctcgacgagctgcatcaggctgccgagtcccggaagctgaccgtgcttgacccgccgatccccaagcgtgtcgtcatcgccgataccgtcgaggccgcgcgcggtctcgacgagtggggaagtgccgaggcggccgcgctcggccagttgtacgcccaccacctgacctgcatcgaaggagccctgtgatgacccgtccagccccccgaaagtcctcattgagcggatcaactccggtcgccccgccggctcagacggcgccggcaccgtctgccgcacctaccccccacaaggccgatgagtcacagacgagcagcaccacgaggaagtggcggcacaaggtgtcgttctaccaggacccggccgacaccgaccgggtgcgcggggcgatcctttacacgatgacgaccgagggcaaccggaacctgagccagttcgtcaacgatgccgtcatggccaaggtggtcgagctggaagtcaagtacaacgatggccagccattccccgctgtgggagcccgaggactaccccagggcggtgcagccgccgccggtgagtagaggaccatcgaccgtcgggggcttcaccatgcccccgaccctcggtcatcctgatcctcttgtcgatggtggtgacagtgggggattcacgcctcgttcagatcagaggaagtctcaccgcgtgattagtactatcaaatctgacagtactaacagagcagatagggttccctaggtcgagctgtatcacgccgacaaccagtgagccagtgatctacgaggggcgcaatatgcacccgatcggtagccgcgaaggcctcgccctgccccgatagtactatcaccactatcaatggtgctagtggtgagtttcttccattgatgacaacagcacagtgctgccgtctgtgtgcgggccaccagcccgcacacagttgccgtcgaggacgttgttcatgctctgtggtggccggtcctgagggcggctcgcaggatctcccggcgctcacggcgacgagcctggtagccaaggtctgcatgttcggcggcgagacgggctttgagggttgcggcttctgcacggcggtggagttggtcgtcgatgagttgggcgcgggccagacgccgcttatgggggttgtcgtgggtgaggggggcgtcgaggctgccgtcgtgggttagggccagggctgctcgttcggcgtcgtcgaggccgatgtggtggacggtcacgggtgcggtggtgacgtcgaggatgtccaggtggatgttgtggccgccgccgggggcttcggggaagtctggtgggctggcctggccggtgtcggggtcataccaggacaggccgatgatctcggcccagggtgggggcgggcagacggctcgcagaagggtgtgggccaggaacgtgttgcgggccatgatgcctccaagggtgaaaagcagtcgagtagcgatgacggcggggtagccgtctgctgggctgaggccgaccgggcccatgtcctcgatgctcttgtgctgcggccataccccaaagctaccaaacagtctttttaatctcaaagatacaaacagtgcttgacatattatctgcagcgaaagatactttcatcatggtggctgatcatgattacgcgactcctgacgatgagtggatgacacctcctcaggtggcccgtgtgattccgaacaccactgctcaggctgtccggcgctgggctgaggagggtcagcttcctggggcgtttcgtactccttctgggcgttggcatattccgtggtcggctgtggtgggcatcatggggtttgatccgcgtgagtccgcatcaccgagtgatcgtcaccagagctgacagagtcgtcgatgagctttcgagtgcagagctgatggcacgacggtctggatacttgtggagatgagagacgaccacatccagtcatggtcggggtacaccgaggggcagattcagcagtgctggcacgatgaggttgcccctgccattgactcgctcatggagcaggtaaggtctgttgccgagactcctgtgccgccgggttcgagattttacggcgatgagcagtgggccaagccttttcatccgtctactgcgatctgcggttcaatgggtccgccagcgatcacttgcacgcgctgaagctcctcgtctgggaagcgaacgtccaccatgtctatgcgccgtacacccttgctcgtgcatctattgaggcatcgtctactgctgtgtggctgttgagcacgaagacgcgcggagaacgtgtgctgcgagccttgcgatggtacgcgcaggattgtcacgactcgtgcaggttcatggatgatgagcagtatcgtgaccacctattgcggcgcattgaggggactgtcgctgcgggaaatctcgactcgcgcgctgctaggaaacggtaccgtgcaaccgatgttgtcgatgaggctgatcagctggttcccggaactctgagggcgtggcgagctttttctggtatggcccattcccgtatgtgggcatccagggggctgctcgacatggaagtgctgtccagtggccaaggaatggttacggcgaaggtgacgagcggatcggcccaaatcctttgggccgtcgtggcagctctgaatgttgctctcagtgccgctcgcttgtggcgtgattcgatgtgctcaccgtttgctgttgcccagtcggtagacgcgatgccagaggcgtttcgccgccctgtttagggtctgatcggggtagtgggtgttcacggggtcccaggttggccatggggcggcttggtgatgtgagttgggttgtgtggcagcctgggtgttgggtgtggcttcgttggccacgaaggcatgctcttccttgtgctgggacttgagtccccagtgctctcccctttgctagtggggggtggggtccccggaggtaggtcctccggggactttttctatgtctgtccgtgccccaggatttcgtatctaggcagtaccaattttgggttagttggaggtttctttggtaatggacagggtgagggtgatgaagaggtggccgtccttggtggcagaaattttctcgaacttcagctgaatgttgttatcagccactatctgttgggcggtgaggtgctcggagagcttctggaatccttcgcggatccacaggttgtaggggttggtgaccgagaccgaagggtatgggtcgaccttcagcgtcaggactggctggtctgggttgagggagttgatcttcaccagtttggggtaccggtcgcactcatgtgtctcttgtgttgggggccagcagtcgggggcccattcctcccagtggtcacgcatctcacgaagtactttcctgcatctcagcctctgcaggagctcgcgcgccaccgatgggagggctgccatgatgagggcaaggactgcgaacccgatgatgtaattgaccgtgtccctcgtcacgccgttcttgccgaggattccgatggcgaacgcgatgacgacaccgcccaggcacaggtgcatggggtcatgctgtgatggtttttcttcttcagcgactggtggggctatagtcatgtgtgccccttagtactaagtgatactggtgggttgcttttccccggtggccgtgtgcaagacggccaccggggttttccttcatgttcctgattttatctgcccggtgtggcgttttcatctttgtgtgggtggttcgcctggggtcttggagtgtggtgacgcggtgatggtcacggtgacggtgactgtggcgcgtggcgggtgaggtggttctttcctggtctggtgtgtggcccaggtgagtgtggtgatgagggccagggtgaggatgatgaccagggtggggagtagtttgtctggccggtgtcgccgggcttggtggcgcggcatgtttttccagggtgtgtctccgaacaggtcgtcgtcggaggggtcgtcgtggttcatagggtggccttggcgatggtggtgggcgagtttggtccaggtgatggtgccgtcggaggcgatgtggcggtcggcgggcagggtgtggacggtccatccggcgtcggtgagggcggtggtgaaggatttcttgatggatcgtttgggtaggtcgatgggggcgtgggtgccgacccagatgcaccggtttttgaggtgggtggcgccgaggtggttcatgtcgcggaccatgttttgggtgagtgtgagggtgtcggggtcccattggacggggatgatgatgtggtctgcgatggtgatggcgtgttgccaggcggcgtcgaggtcgttgtttccggtgtcgaggatgatgacgtggaagcggcttcttagggcggtgatgatgcggtcgaggtcgtcggcggtggggggtgtgatgaggctgttgtggttgtcggtgatggtgggtaggcatgtgatggtggcccagccttctggttgccaggagatgtaggggccgaggtcgcggggttgggaggcgaatcctgggtgacgggctgcgcgggcgaggtcgatgacggtgttgtcggtgtggcggggtgcgcgggtggagagggtgccgcgtgggttgatttccacgacgacgatgtcgtcgtgtcctgctgtggtggcgagggcttgggcaaggatgacggccagcggggttttgccggtgccgcctttgaggttggcgagggtgatgatgtggtcggtgagttgggcgggtgcggcggtgtggtgagggttggcggtgaggttggcgatggtgaacagggcatcgagatcgtcggtggtgttctgctcggtgggttgggggtcgccggagatgatcgggtcggcgcggcgcggctgccatgccggcctcaccactgtcacgaccaccacgggtctgctggcgctgtgtgggtgtcgtcggcgatgactcacgatcggcagtctcaccatcgtctcggtgatgctcggctagcgctggacccggtcaagttcgggccggctcacccagtggtgatgactcggtcacagaaccgctgccggtcgttatctcggacgtctcgactcctccagtcctgatgggcgttggagccacctacacctactctcagaacgaccccgacctcgtgtggggcgggggcagatgtcacttgggccaatcgagagcccaggtgatggggaaagcaggggtgtgatatctgtcctggaaaactgggcagctgctaccgtggattgacggatctccacgaaagaagggaatgcgaccatgcagatcaccgtcaagaccatcaaagatcatcgggttcgcactgtccagaccgccatgagcagcgccttggggattggttcccaggtagacatgctcgcccccggcggttccaccagctcgagttccggttcatgctgctcgtgctcgacctgcgcggtagtggcgcagcctcaagactgaacggctggtcagccccaggggcgtggcgctcatcgcgtcacgccccttctattcgctggacagggtgcgcgagctgaggaacatcgcggtgtgtgcgatgacgaggggcaggagcaagtctgtgcgggttgccaagtagccctgcgcgatggccatcacgctggccccgacggcggcgaagacacctccgatacgtcgcttcatgccgccgaattgcatcaggacgaataggactcccgcggtccacatccctccgggcatgcatctgggaaagatgaaccggaagatgatctcttcacaggagagctggagtactagcagcgtagcccccacggggagactcacctctactgacagacggatcgtcttcatccacccacccgagctggcatcgaccatttcggtggccatgcgcgaccggtggcctcgtgcctctcgctgcgtgtcgatccagccgagcagtccgtggacgctctccgctaggactcctgacgcgacagtctcaccaattcctaagcccacggcgaggaccgcgacgcccccctgcacggcaggctgtgtgacttggtggtcccaccaacccgccggcaggaccatgcgtgcgaggctgcacacgagcaggaggtggagggtcacgacgagcgacatctggaataccgcttgccgttcggcgatggtggcgttgggaaagagcggtaggccggcacgggcagcggcgctcgacagcttccgcaagagcggtttggagacgaagtagtaggcgacgtacagcgccagcgctgtcgcgatgatgatcatcggtctgccaccgagctgacccgccgatagccgtttctgttccaccaatactggctgttgtagatcaggtggcccagaacacaggcccagatcccccagaagatgaacaggatagtccccaaggcggcgagcgggatcttggagaggacctgtccccgtccgaacaccgagtggccgcaagcaaacaagagtgctcccacagcggtgagcgcgagccaggccggggttgctcgcagactgatcaccgggaccccgacccggaagccgacctcttctcctacagcgatgactagcaactgccacagcggcatgttctgaacggagcgcgcgactcgggctcgagtcacccacacgggctgttgagcgctcacatcaccactcaggtaccccggtgaggcacttcgcttagtactggggcccgatgtgcgagcattcgtgatgtgtcgcaggatccggttgtcaagccaagaggccagcagggctccggcgacagtgacgggtagcccgatcagcacgaggccccagccatgcggtgccgagaggtttctggccggcgtgcacgcgaggcaggcaaatgccatcactgccagcactacgacgtagatggtcgcataattcgacttgcgggtgacgttgccgaccatcttggccaaagtcgctggggaccagctgatgagtgcgatggtggtcagcaggaagcaggaccagacagacatccggcgcactcaggggtatgggtgcggctgtgggttttggaaaccgccatatgcggcgtagcgggggtgtgcccgcatgggtgcgctgggcagtgacagggcgagcagcccaggcgcccagagcctgacacagtgcagtcccagcccctggatctctatggtggtgaaatcttcgatgtacaggggtgacacacaggtgatgctgttgaccacgctctttaccagttccgcccccgtgtgggtgtcgtcaggtggcaggtcttcggcttgggcaatggtgcccgcgtcgaatttcgccacaactgattgcgcggcctgatagttcctcgcgtagtaggagacgttcgagtcgaggtcaagcatgtcctccgtggacatactggacgcgtcggcctcggcgtcgaaagacgtccataccgcgagcatccgaaccccgctgcactcgagaaacgccttgtacatggctgcttccagacccgcgtctgcacctaggccgacggcgacgaggggaagttggttgccactaccgaccatcatgcatgccacggtgaaatgcttgagcccgggagtcggaagccagtagaaacgcagttcgtggcttcggcccgctgcacgttccacgagccgctggatgcgctggaggcggggtccttcgacgcggatgcgcacaggtgacgaggctccataccacaggcccatcgcggcatctacctggatcaattcataagccgcggacagcgttgcggcgacgcgtgaagtgtggacggcggtgccggtcgtcacggccgttcccagccacggctcaccgtcgtgccgacgggggttgtaacccaggtaaaagaactgcgccgggatccactcctgccgggaggtcccgacacggggagtcttgacccatgtcatgggcaagtcgtcgcgataggtgtcgaacgcacctccagccactcgttgcgcgaagccgaatgcgcccagatcgagaacttcgtcctcggtccgggcgaggagttcctgacgagtcgcccagcgccgttcgaagggactatggagaatcccggtacccgcgcagtagcgctcgacggcctccgcgtagaccttgatctctgcctcaaactcgttcagccccaccccaccgatgtggtagctacccggcttggggtcgggccggtcaagcagtgcgtgcatccccgtgagttccccaccgttcacccgcacgcgggggccgagcgcggggtgcagcgagtagccgacggaagtcaccagcccgcatagcgggctgtaggtgcgccgcctgagccgggctgcggtctcgacggggtcgctatcctggcgaagcttcatcgctcgccccctgccgccagccactcacggatgtcgtagtacaggtccggagcggtttcaacctgcgctggtgcatcaaaacgggacataggtaggacgtcgttgtaggcgatctccatcgtcggtatgtagaccgacaacactttgttgcgcgtcgtgttgaggccgttgcgggcgatgctgacagcctcatgcgcgacgtgcgcggccaagatcgcgcgcaccgacgctgccacggccggcgctccggcccttacgcggtcggcagcggccacccgcatccaggacaggtagctctgccgttcgcgcaggttcatcgcgacccgctgctcgaaggtccggtaggacgaggtcgcaccagggacgacgtagggacccacgtacaaggccggcccgtctacagctgcgtggagccacgacaggtgggcgcgtcgggcgaacaggtcaagggcgcgcagcatagccgggttgttctgcgccagcgctaccacaaggagtggctgcaggtccggcgccgaacccagcaacgccaacatctgggaggcctcctgctccatgtgcaactcgtcggccgactgctcaagccgcaggcctgcgaagagggtggctgatggctgcgtgtcgtcagcgaggacggtagcctgcagcccctctccctcgagaatctgctggatatcgccggcgaggagcgcgtcgtcgctgaatacccacaccgggcgcgtctctctacctccatccatcttgtcctcaacgttttcgaccagcgcaccgatcgatgctaggtgggccatcacgtcgtcaagggccgcgcgggtcaatccgggcacccgggacacgatctcgggcggctgcagtccttggctcaacaagtccaaggccggccacagggtcccggtggcgtcgtcgtcctccagcgttgtgctctcggcgttccagacgcctcgacggaactccaccctgtccatcgagtaaggcaccatcatgaggcccggtgaaatgtggttggtcactttggctcctgtacagcctaggcttggacgcccacggtcatggtgtgggtcgcggtttggaaaatcccgtcgaggttgagtgcctgattgagttcgtcctcgtagaagcttgaggactcgactgaggcaagaccgagccccgtgcagaccaagttgatctgttgtgcgatcgccccgacttcttgaagggcgaacctcaaacccctggctccgtacttccgcatcgccctccacggcgagatgacgaacaccaagtgcactccggccgcatccgattgctccacggccggctcgccggccatcgaattcctcacgccgcgacagccctcttcaccggtcacgggcaccagtcgatcgatgaccggcgagtagcggtagacgccgcgactcaagccggacacccgttgtgcggacatgaagatagacacgggatacagccctccaccagacgggacagcgcgtacattataccgcacgatatcaccgctcgaacgtgggacatccacgtgccccgtcacaccggcagcacctctcagaaacgcagctacgtcacgcaggtctagggattcgccggtgtagttccgtccgctgcgccggcgggcgatcacttgctcgaggggtgcgcgcaccctgctggacctgggaagttcgatcacatcggcagcgaacgtgtcgcgatccatctgtccgtacgtaacgatcatggggtcaacgaaatagtcgccgaccgagacgttgaactccatatccccccgggcgatgcgcgaggcgagcaagaagtctgcagctgcgttagacagccccggcccatcagtgttgtcgcagcggaactcgtgggtccgaaaccccacaccttccgtgcccgggctctgcgctcgatacgacgtgatcgcagaactagccttccttaaaccgcccggagtagctaccatgaccgtcccctctgaggtctcccgaacacttgcgacaatagcagcatgtgggggcagccgccagaggcgggcatccttgtctcgacaaccattgacctccggattcgatatgtgcataatcatagtcgtgccaacacgaaacgtgtacgtctcggaagacgacctagacctgttcgccgaagccaccgagatcgctggaggcctgtccgcagcggtgttggaggccttgcgcagctacgtagacaggcaccatcgcgcggccggcggattcgacgagatcgagctggagctgcagaacgacggtatcgaccaccgtgtcaccttcatgggtcgccgcctgatacacatccgccgtccagatcccgagggaacccgcatagacactgtctacttgaccgccaaacaccaattcgccgttgccaccaaaatccaacgacggctgccagactggacggccggccacgagcacatctggtccgacccggagacctggaatcgggagttctggatcgcaggtgacaagacgatggccgtgtatcccagccttgacaaactccgcgaagctgaccccaatgtggccgaacgcgccgaggccgcggtcaaaatcccgccgttcgaggtcctggacatctgatgacagaatcatcatcttcccggcggcaattggcaatgccggtgctgtcagtcacggatctagccaagaaatacgtggttcatggcggctacgaggtcccggcactcaacggtgtctcgtttgacctgcacccgggagagatgctgggtttgttcgggccaaacggtgctggaaagacgacgctggtcaggatcatcgcgggcctcttatcggcagattctggagacgtccactggggatcggatcaaggtcgggccaggttaggctacgtgtcccaaaagggtggactgcagtacgggctcacgtgccgggaagagatggtcttccacgcacaatgcttcggccagtccgccaagcaggcccggactagcgtcgacgaggtcgccgcgatgctgcactgcgattacctgatggagtgggacgtcggaaggctctccggtgggcaacgccgaatcatcgaggtagggctagcactcgtcaatcaaccatcggtcgtcctgctcgacgagcccaccctgggcctggaccccgcaacacgcctgtcgttgtggcaaacggtaaagtcggcacgccgtgagaccggtgctgccttcctcgtcaccacccactacattgacgaggtggccgagcacctgtccaacgtcagcgtgatcaaccacggaaccgtcgtcgccaacggctcgccagcgcacatccgagaaatgttcgcgaccggggaagtaacgctcggcgtggccgaggatacggtggacagtgcggtggacgtgttggctgggaccgcgttcgaggcgcaccccaccgaaaccgtcccggggatcgtggtcaggtccaggcatcccgacgtggacgcggccaagatcatcaccatcctggctggtcatggcatctcggtggactccatatccgtacgcgaggcgaccttggaagaggcgtttctcacgatcacaggcagtcgagacccggagaggcaaatcccatgaacacttgcttcaggcgatatgcggcgatgtcgctgagagcgcggcgtgatttggccctgacattcatccagcccctcgtctacctagccctcttcggaccgctcttcgtcacgacgatgaagatgtcgcagagagctaccgccgctacgggttactccctatacatcacgggcctgtccatccaaatggccatgacgatcggtgccttcgcggggctaaccatcatcctcgaataccgactcggcatcctcgaacggatctggagcacccccctcacggggagcaagatgatggcggggcgaatcgcgcgcgacgtcgttatgatgatgatgccgatactggtcgtcttcatcatcggcctggtgctgggaacacgccccagcccactgggcctggcgacctacttcgtgacagtgctcggcacaggagccacgttcgccggggtctcctacgcggtggcactcagaacgaagagcgaggcagcgctatccgcgatcttcaacctcatcctgctacccatcctcctgctgtcggggatcatgctgcccatgtcgttcgcaccacactggatcgccaccgctgcccacgtgaacccgttgtggtacctggtgcaaggcgcgcggaaccagttcagcgttctagggctcgtggcggcggccccatggagttgggctgtggccatcgtcatgtcagccgctgccttcggctgggcaagccacgaattcaacaagaggcgctgacacaaagaatggtgccgggaacccaggtccccggcaccaccgagtgcactcgcgacgtcaacgcaccgttgcggtcactgcgcaggtcgagcacgaggacgacgagcccgcgctgctgcaggtcgagccgccaggcgcgagcaggtcgacgttagcgtcggcgccgccgaagacggacgtgacggccggctgagaggtgcggatgcggtgctccagcgaggaggtggtggtgagtttcatgggaggtgctcctaggagtgagacgagaacaaaccctagcgataggttagcagtccgcaaccgactccgggaatagtagaagcgcgcatccgtagcggaagaccttagcctgattacagtgaccctgttcgcgtctcaacattattccacacccccgagcagcgaacgacaccgcgatgatgatccgtcgcctctccaccgaagaactccgcgcccacatcgcaccgggccgccgtcccgtgcatcagacctgccgtcaacgtcggccatgaagctgggaaggtggctctcgtctaggagcagacgcgggacgcctcctccaggttgggccggggaagtgtccggttcttgatgtaggtggcggtccctattgatgggcgttgaccgtgggaatgcggtcggcgaagggggtggcgaacccgttgagcgcaggcttccagcgcatgcatcaacgctgtctgccggccaccggcaagcctcacccgcccgtcatggccatcatcgaggtgccggtgaatcctcgacacatgatcccaactcccccggaggggcttccggggctgttcagccaccagatcagccaggcggcgagcccgactctgccacccggaccctgcagagcgtgcctgctgccgtcgtgtcgtgtcgggccagtgggccaccagatcggccacatccgtcttggcccatctccagcccgccagacccagggaggccatcacctcatcgacgccgcgccgggtggtctcatcaaccccgtcaaacagctcgggccacctcgatgatgccgtccgtgaacgatccagattcatgacatgctcctcttcacagatgccgacgacgatcaggccgtggccgtggcaacggggtgacctgccggcgcggctcacgacgttgagccggaaccacacgagacgcaccagtgtgctgcgccgtcttgagtcgggcgctgtactgggccctggcgctgtggtgaacagcccgacgaagcaccgaccgccggctgtcctcatcgccagggcgaggcatggggcgcggcatggtgcgcccggtagcagcatccatgagggtgatccggtcagccaaaatgccgagccggttttcccacttccggggccacggcaccagcaggtcacgctgacagcccacgccgtggcgtcggcagtccacaacattttctcacggccaggatgcgagtgcagcagctccaccggaacaccagcatcacgcacccgccgcatcgtgacctcatcctcacgtgccaccagcgggggagagcgactaccgctgcagccggtccaaagcgactcttcacagatgagggggtggatcggtagctgacccctaggtcctgatgtgggtcgaggtcct

SEQ ID NO: 100 - DNA, 599 bp, Propionibacterium acnes
  source 1..599: mol_type = genomic DNA
accagatcggccacatccgtcttggcccatctccagcccgccagacccagggaggccatcacctcatcgacgccgcgccgggtggtctcatcaaccccgtcaaacagctcgggccacctcgatgatgccgtccgtgaacgatccagattcatgacatgctcctcttcacagatgccgacgacgatcaggccgtggccgtggcaacggggtgacctgccggcgcggctcacgacgttgagccggaaccacacgagacgcaccagtgtgctgcgccgtcttgagtcgggcgctgtactgggccctggcgctgtggtgaacagcccgacgaagcaccgaccgccggctgtcctcatcgccagggcgaggcatggggcgcggcatggtgcgcccggtagcagcatccatgagggtgatccggtcagccaaaatgccgagccggttttcccacttccggggccacggcaccagcaggtcacgctgacagcccacgccgtggcgtcggcagtccacaacattttctcacggccaggatgcgagtgcagcagctccaccggaacaccagcatcacgcacccgccgcatcgtgacctcatcctcacg

SEQ ID NO: 101 - DNA, 17175 bp, Propionibacterium acnes
  source 1..17175: mol_type = genomic DNA
gtgttccagtgcctcgcgggcgtgatgttcttcttcggcaccttcttgccacatgcttcgcgcttcagcctcgccatccaagcgaacctggactgtgaacgagtcctcatcgggtccgtcctcattccacgcggcaatgatcccacgggcctcgtctgcgacctgactcaacttcatcgcctgcccgacagccccgagagccggaatctcgaacacccagatattcgcctcagccgagacctcacgatgggcgatcacttcgtaggtcgtctcaccttctactgtcgtgtccattacttccactccttcggaattttcacgcctgctcgctccagctgtgccaggacaccaactgacgtcagctggtgtcctgctggtatcgatacgcgcccggctccgccggggcgtccccagatttcatggcttcccttggcgttccgcagacgggcccatccttgagaacggagcagcttgaggacgtccttagttttctgcggtttcacacatcatagtatagccccacttaacttgtaaactaagcccctgtttacattttagttggtgcatgtgatccctgctcttatgacgtcgcccgacctggcgccttagacatgcactgttcatcctcaaccacactcaccgtcacgggtccgaaggcgaggtctatcaccattcgcatcgatgaagttgaagcaggatcgtccgcatcacgcactgccgatccggacagacgccaccggccgtaccgactgtttacgatctgccaccgcaggctgctgccataaccgctatcacctctgatagtacttttagtactatcagaggtgattcaagattctcctgtcgagcagccctacagtcacgaagtcctgcgatcgtcatcgcttaaggcagacggatggccatcggggaccactcgcaaagcaggggcgatcagcaacagtgatgtgccatgagcaagtactggtgcaccggctgtttactccgcccctagataaaccacgggtgcaggggtggacaccacaccatgaccgatgtggtgcccaccccatggctcacaggcaggccctatcgccgggagcactgctgcagatgaggctcagtaacctgccatgtctcacctggggccaaggtgccaagctccccacggaatctcaggcatcggaaaccagcagccgaacttccacagcatgagcgccctacgaaaaagcaggccgccgacggttctcaagaactcgccggcggcctgcatcgcaactcgaactgtaaccgtggtccgaccccgtgcacaggtaagctccacactcccaccaggcatggccgaggcagtaccaagttgccgtggcccatcggcagatttggttaaattttgaaaagtcatatagactccttctgtaaatttttaaatctcataggactctcgccatcgccagccagcttcgacaggagtcccgatgtttcaccgagtgaaatatcggcaccgtttgagttgacctaaagctcaaaagatgctagaatccatcttacctcgttaggggcgttttttcaaacgcccctatattgcgtgtcttcgcgcgtcgtagcgctgatgctgcgcctgtgtcgactatccgtttgtaagtactttcgatgacaccagcagtggctactcatgactggtgcgtgcgggtctaaagcagcagggaaaggaatcgcagtagaagccgcttgattcctatcacccctgatggtactatcagtactaacagagcagggcttactcgatgcgtgagaatcggggacatgctgagcctctcgtaggtcattggcctgctgggcgtcagtgtggcgcggttcgatccagtgaactctatcagctctgttagtactgtcagagttgatatattcgaccccaggaggagcccatgagttacatcgttcgcaccggaaatttggtcgacacccccgagctgcgtgagggagagcatggcccgtacacctacgctcgcgtcatcgtgtccgatcgcattcgccaggaggacggcagctacgtcaacgggccagcgatcgcctacgacgtcttggcgggtggcagccaagccgtgaatctggttgaagccgccaaggcgagcggcaacatccgcatcatgttcgcgggccgttaccgcgtcaccgagtggcggggtgagcagggcactcgtatccagcatgaggtccgagccgacgaagtgagcgtgagcctgctcggtcagagggtgaccgtggagcggcctcgaggtgacgtggcatccaaggagagcacgtcgttctgattgagtccgggggcacggtggtcgccgtggtaaaccgtgcccctgacagtactattgacactattggaggtatcagtgtgactgttcaaattttcgccttgtgcaaccagaagggtggcgtcggaaagtcgacatcgacgtttcatctggcccgtgccgcggtgttgcgtggccagcgtgtgcttgtcgtcgacaacgacccccagggcaacctgacgtctgtcgcggccgccgagcccgtgggggaggatcaggcggggctggccgatgtgctcagcgcgcgtgctccagagaccctccgcgatgtgatcgtgccgggaatctggtctggcctcgatgtcgtgccgacgtctggcatcacgctcggctgggtgcgtgacgaactcgtgatcgccggtgccggccgagaaggccggctgcgggaggccctggccggcgtcgaggacgactacgacgtgatcctgatcgactgtgctccatcgctcgatcagctcacgatcaacggcctggtggccgcccagggtgtcatcgtcgtgacgcactcgaagttgtggagcgccaacggcctcgcccagctgctcgacaccatcgacagcgtgcgcagctactacaacggcgcgctgcgcgtggcgggcatcatcgtcaaccagcacgaggagaacaccatcagcgggaaaacctggctcgacgagctgcatcaggctgccgagtcccggaagctgaccgtgcttgacccgccgatccccaagcgtgtcgtcatcgccgataccgtcgaggccgcgcgcggtctcgacgagtggggaagtgccgaggcggccgcgctcggccagttgtacgcccaccacctgacctgcatcgaaggagccctgtgatgacccgtccagccccccgaaagtcctcattgagcggatcaactccggtcgccccgccggctcagacggcgccggcaccgtctgccgcacctaccccccacaaggccgatgagtcacagacgagcagcaccacgaggaagtggcggcacaaggtgtcgttctaccaggacccggccgacaccgaccgggtgcgcggggcgatcctttacacgatgacgaccgagggcaaccggaacctgagccagttcgtcaacgatgccgtcatggccaaggtggtcgagctggaagtcaagtacaacgatggccagccattccccgctgtgggagcccgaggactaccccagggcggtgcagccgccgccggtgagtagaggaccatcgaccgtcgggggcttcaccatgcccccgaccctcggtcatcctgatcctcttgtcgatggtggtgacagtgggggattcacgcctcgttcagatcagaggaagtctcaccgcgtgattagtactatcaaatctgacagtactaacagagcagatagggttccctaggtcgagctgtatcacgccgacaaccagtgagccagtgatctacgaggggcgcaatatgcacccgatcggtagccgcgaaggcctcgccctgccccgatagtactatcaccactatcaatggtgctagtggtgagtttcttccattgatgacaacagcacagtgctgccgtctgtgtgcgggccaccagcccgcacacagttgccgtcgaggacgttgttcatgctctgtggtggccggtcctgagggcggctcgcaggatctcccggcgctcacggcgacgagcctggtagccaaggtctgcatgttcggcggcgagacgggctttgagggttgcggcttctgcacggcggtggagttggtcgtcgatgagttgggcgcgggccagacgccgcttatgggggttgtcgtgggtgagggtggcgtcgaggctgccgtcgtgggttagggccagggctgctcgttcggcgtcgtcgaggccgatgtggtggacggtcacgggtgcggtggtgacgtcgaggatgtccaggtggatgttgtggccgccgccgggggcttcggggaagtctggtgggctggcctggccggtgtcggggtcataccaggacaggccgatgatctcggcccagggtgggggcgggcagacggctcgcagaagggtgtgggccaggaacgtgttgcgggccatgatgcctccaagggtgaaaagcagtcgagtagcgatgacggcggggtagccgtctgctgggctgaggccgaccgggcccatgtcctcgatgctcttgtgctgcggccataccccaaagctaccaaacagtctttttaatctcaaagatacaaacagtgcttgacatattatctgcagcgaaagatactttcatcatggtggctgatcatgattacgcgactcctgacgatgagtggatgacacctcctcaggtggcccgtgtgattccgaacaccactgctcaggctgtccggcgctgggctgaggagggtcagcttcctggggcgtttcgtactccttctgggcgttggcatattccgtggtcggctgtggtgggcatcatggggtttgatccgcgtgagtccgcatcaccgagtgatcgtcaccagagctgacagagtcgtcgatgagctttcgagtgcagagctgatggcacgacggtctggatacttgtggagatgagagacgaccacatccagtcatggtcggggtacaccgaggggcagattcagcagtgctggcacgatgaggttgcccctgccattgactcgctcatggagcaggtaaggtctgttgccgagactcctgtgccgccgggttcgagattttacggcgatgagcagtgggccaagccttttcatccgtctactgcgatctgcggttcaatgggtccgccagcgatcacttgcacgcgctgaagctcctcgtctgggaagcgaacgtccaccatgtctatgcgccgtacacccttgctcgtgcatctattgaggcatcgtctactgctgtgtggctgttgagcacgaagacgcgcggagaacgtgtgctgcgagccttgcgatggtacgcgcaggattgtcacgactcgtgcaggttcatggatgatgagcagtatcgtgaccacctattgcggcgcattgaggggactgtcgctgcgggaaatctcgactcgcgcgctgctaggaaacggtaccgtgcaaccgatgttgtcgatgaggctgatcagctggttcccggaactctgagggcgtggcgagctttttctggtatggcccattcccgtatgtgggcatccagggggctgctcgacatggaagtgctgtccagtggccaaggaatggttacggcgaaggtgacgagcggatcggcccaaatcctttgggccgtcgtggcagctctgaatgttgctctcagtgccgctcgcttgtggcgtgattcgatgtgctcaccgtttgctgttgcccagtcggtagacgcgatgccagaggcgtttcgccgccctgtttagggtctgatcggggtagtgggtgttcacggggtcccaggttggccatggggcggcttggtgatgtgagttgggttgtgtggcagcctgggtgttgggtgtggcttcgttggccacgaaggcatgctcttccttgtgctgggacttgagtccccagtgctctcccctttgctagtggggggtggggtccccggaggtaggtcctccggggactttttctatgtctgtccgtgccccaggatttcgtatctaggcagtaccaattttgggttagttggaggtttctttggtaatggacagggtgagggtgatgaagaggtggccgtccttggtggcagaaattttctcgaacttcagctgaatgttgttatcagccactatctgttgggcggtgaggtgctcggagagcttctggaatccttcgcggatccacaggttgtaggggttggtgaccgagaccgaagggtatgggtcgaccttcagcgtcaggactggctggtctgggttgagggagttgatcttcaccagtttggggtaccggtcgcactcatgtgtctcttgtgttgggggccagcagtcgggggcccattcctcccagtggtcacgcatctcacgaagtactttcctgcatctcagcctctgcaggagctcgcgcgccaccgatgggagggctgccatgatgagggcaaggactgcgaacccgatgatgtaattgaccgtgtccctcgtcacgccgttcttgccgaggattccgatggcgaacgcgatgacgacaccgcccaggcacaggtgcatggggtcatgctgtgatggtttttcttcttcagcgactggtggggctatagtcatgtgtgccccttagtactaagtgatactggtgggttgcttttccccggtggccgtgtgcaagacggccaccggggttttccttcatgttcctgattttatctgcccggtgtggcgttttcatctttgtgtgggtggttcgcctggggtcttggagtgtggtgacgcggtgatggtcacggtgacggtgactgtggcgcgtggcgggtgaggtggttctttcctggtctggtgtgtggcccaggtgagtgtggtgatgagggccagggtgaggatgatgaccagggtggggagtagtttgtctggccggtgtcgccgggcttggtggcgcggcatgtttttccagggtgtgtctccgaacaggtcgtcgtcggaggggtcgtcgtggttcatagggtggccttggcgatggtggtgggcgagtttggtccaggtgatggtgccgtcggaggcgatgtggcggtcggcgggcagggtgtggacggtccatccggcgtcggtgagggcggtggtgaaggatttcttgatggatcgtttgggtaggtcgatgggggcgtgggtgccgacccagatgcaccggtttttgaggtgggtggcgccgaggtggttcatgtcgcggaccatgttttgggtgagtgtgagggtgtcggggtcccattggacggggatgatgatgtggtctgcgatggtgatggcgtgttgccaggcggcgtcgaggtcgttgtttccggtgtcgaggatgatgacgtggaagcggcttcttagggcggtgatgatgcggtcgaggtcgtcggcggtggggggtgtgatgaggctgttgtggttgtcggtgatggtgggtgggcatgtgatggtggcccagccttctggttgccaggagatgtaggggtcgaggtcgcggggttgggaggcgaatcctgggtgacgggctgcgcgggcgaggtcgatgacggtgttgtcggtgtggcggggtgcgcgggtggagagggtgccgcgtgggttgatttccacgacgacgatgtcgtcgtgtcctgctgtggtggcgagggcttgggcaaggatgacggccagcggggttttgccggtgccgcctttgaggttggcgagggtgatgatgtggtcggtgagttgggcgggtgcggcggtgtggtgagggttggcggtgaggttggcgatggtgaacagggcatcgagatcgtcggtggtgttctgctcggtgggttgggggtcgccggagatgatcgggtcggcgcggcgcggctgccatgccggcctcaccactgtcacgaccaccacgggtctgctggcgctgtgtgggtgtcgtcggcgatgactcacgatcggcagtctcaccatcgtctcggtgatgctcggctagcgctggacccggtcaagttcgggccggctcacccagtggtgatgactcggtcacagaaccgctgccggtcgttatctcggacgtctcgactcctccagtcctgatgggcgttggagccacctacacctactctcagaacgaccccgacctcgtgtggggcgggggcagatgtcacttgggccaatcgagagcccaggtgatggggaaagcaggggtgtgatatctgtcctggaaaactgggcagctgctaccgtggattgacggatctccacgaaagaagggaatgcgaccatgcagatcaccgtcaagaccatcaaagatcatcgggttcgcactgtccagaccgccatgagcagcgccttggggattggttcccaggtagacatgctcgcccccggcggttccaccagctcgagttccggttcatgctgctcgtgctcgacctgcgcggtagtggcgcagcctcaagactgaacggctggtcagccccaggggcgtggcgctcatcgcgtcacgccccttctattcgctggacagggtgcgcgagctgaggaacatcgcggtgtgtgcgatgacgaggggcaggagcaagtctgtgcgggttgccaagtagccctgcgcgatggccatcacgctggccccgacggcggcgaagacacctccgatacgtcgcttcatgccgccgaattgcatcaggacgaataggactcccgcggtccacatccctccgggcatgcatctgggaaagatgaaccggaagatgatctcttcacaggagagctggagtactagcagcgtagcccccacggggagactcacctctactgacagacggatcgtcttcatccacccacccgagctggcatcgaccatttcggtggccatgcgcgaccggtggcctcgtgcctctcgctgcgtgtcgatccagccgagcagtccgtggacgctctccgctaggactcctgacgcgacagtctcaccaattcctaagcccacggcgaggaccgcgacgcccccctgcacggcaggctgtgtgacttggtggtcccaccaacccgccggcaggaccatgcgtgcgaggctgcacacgagcaggaggtggagggtcacgacgagcgacatctggaataccgcttgccgttcggcgatggtggcgttgggaaagagcggtaggccggcacgggcagcggcgctcgacagcttccgcaagagcggtttggagacgaagtagtaggcgacgtacagcgccagcgctgtcgcgatgatgatcatcggtctgccaccgagctgacccgccgatagccgtttctgttccaccaatactggctgttgtagatcaggtggcccagaacacaggcccagatcccccagaagatgaacaggatagtccccaaggcggcgagcgggatcttggagaggacctgtccccgtccgaacaccgagtggccgcaagcaaacaagagtgctcccacagcggtgagcgcgagccaggccggggttgctcgcagactgatcaccgggaccccgacccggaagccgacctcttctcctacagcgatgactagcaactgccacagcggcatgttctgaacggagcgcgcgactcgggctcgagtcacccacacgggctgttgagcgctcacatcaccactcaggtaccccggtgaggcacttcgcttagtactggggcccgatgtgcgagcattcgtgatgtgtcgcaggatccggttgtcaagccaagaggccagcagggctccggcgacagtgacgggtagcccgatcagcacgaggccccagccatgcggtgccgagaggtttctggccggcgtgcacgcgaggcaggcaagtgccaacactgccagcactacgacgtagatggtcgcataattcgacttgcgggtgacgttgccgaccatcttggccaaagtcgctggggaccagctgatgagtgcgatggtggtcagcaggaagcaggaccagacagacatccggcgcactcaggggtatgggtgcggctgtgggttttggaaaccgccatatgcggcgtagcgggggtgtgcccgcatgggtgcgctgggcagtgacagggcgagcagcccaggcgcccagagcctgacacagtgcagtcccagcccctggatctctatggtggtgaaatcttcgatgtacaggggtgacacacaggtgatgctgttgaccacgctctttaccagttccgcccccgtgtgggtgtcgtcaggtggcaggtcttcggcttgggcaatggtgcccgcgtcgaatttcgccacaactgattgcgcggcctgatagttcctcgcgtagtaggagacgttcgagtcgaggtcaagcatgtcctccgtggacatactggacgcgtcggcctcggcgtcgaaagacgtccataccgcgagcatccgaaccccgctgcactcgagaaacgccttgtacatggctgcttccagacccgcgtctgcacctaggccgacggcgacgaggggaagttggttgccactaccgaccatcatgcatgccacggtgaaatgcttgagcccgggagtcggaagccagtagaaacgcagttcgtggcttcggcccgctgcacgttccacgagccgctggatgcgctggaggcggggtccttcgacgcggatgcgcacaggtgacgaggctccataccacaggcccatcgcggcatctacctggatcaattcataagccgcggacagcgttgcggcgacgcgtgaagtgtggacggcggtgccggtcgtcacggccgttcccagccacggctcaccgtcgtgccgacgggggttgtaacccaggtaaaagaactgcgccgggatccactcctgccgggaggtcccgacacggggagtcttgacccatgtcatgggcaagtcgtcgcgataggtgtcgaacgcacctccagccactcgttgcgcgaagccgaatgcgcccagatcgagaacttcgtcctcggtccgggcgaggagttcctgacgagtcgcccagcgccgttcgaagggactatggagaatcccggtacccgcgcagtagcgctcgacggcctccgcgtagaccttgatctctgcctcaaactcgttcagccccaccccaccgatgtggtagctacccggcttggggtcgggccggtcaagcagtgcgtgcatccccgtgagttccccaccgttcacccgcacgcgggggccgagcgcggggtgcagcgagtagccgacggaagtcaccagcccgcatagcgggctgtaggtgcgccgcctgagccgggctgcggtctcgacggggtcgctatcctggcgaagcttcatcgctcgccccctgccgccagccactcacggatgtcgtagtacaggtccggagcggtttcaacctgcgctggtgcatcaaaacgggacataggtaggacgtcgttgtaggcgatctccatcgtcggtatgtagaccgacaacactttgttgcgcgtcgtgttgaggccgttgcgggcgatgctgacagcctcatgcgcgacgtgcgcggccaagatcgcgcgcaccgacgctgccacggccggcgctccggcccttacgcggtcggcagcggccacccgcatccaggacaggtagctctgccgttcgcgcaggttcatcgcgacccgctgctcgaaggtccggtaggacgaggtcgcaccagggacgacgtagggacccacgtacaaggccggcccgtctacagctgcgtggagccacgacaggtgggcgcgtcgggcgaacaggtcaagggcgcgcagcatagccgggttgttctgcgccagcgctaccacaaggagtggctgcaggtccggcgccgaacccagcaacgccaacatctgggaggcctcctgctccatgtgcaactcgtcggccgactgctcaagccgcaggcctgcgaagagggtggctgatggctgcgtgtcgtcagcgaggacggtagcctgcagcccctctccctcgagaatctgctggatatcgccggcgaggagcgcgtcgtcgctgaatacccacaccgggcgcgtctctctacctccatccatcttgtcctcaacgttttcgaccagcgcaccgatcgatgctaggtgggccatcacgtcgtcaagggccgcgcgggtcaatccgggcacccgggacacgatctcgggcggctgcagtccttggctcaacaagtccaaggccggccacagggtcccggtggcgtcgtcgtcctccagcgttgtgctctcggcgttccagacgcctcgacggaactccaccctgtccatcgagtaaggcaccatcatgaggcccggtgaaatgtggttggtcactttggctcctgtacagcctaggcttggacgcccacggtcatggtgtgggtcgcggtttggaaaatcccgtcgaggttgagtgcctgattgagttcgtcctcgtagaagcttgaggactcgactgaggcaagaccgagccccgtgcagaccaagttgatctgttgtgcgatcgccccgacttcttgaagggcgaacctcaaacccctggctccgtacttccgcatcgccctccacggcgagatgacgaacaccaagtgcactccggccgcatccgattgctccacggccggctcgccggccatcgaattcctcacgccgcgacagccctcttcaccggtcacgggcaccagtcgatcgatgaccggcgagtagcggtagacgccgcgactcaagccggacacccgttgtgcggacatgaagatagacacgggatacagccctccaccagacgggacagcgcgtacattataccgcacgatatcaccgctcgaacgcgggacatccacgtgccccgtcacaccggcagcacctctcagaaacgcagctacgtcacgcaggtctagggattcgccggtgtagttccgtccgctgcgccggcgggcgatcacttgctcgaggggtgcgcgcaccctgctggacctgggaagttcgatcacatcggcagcgaacgtgtcgcgatccatctgtccgtacgtaacgatcatggggtcaacgaaatagtcgccgaccgagacgttgaactccatatccccccgggcgatgcgcgaggcgagcaagaagtctgcagctgcgttagacagccccggcccatcagtgttgtcgcagcggaactcgtgggtccgaaaccccacaccttccgtgcccgggctctgcgctcgatacgacgtgatcgcagaactagccttccttaaaccgcccggagtagctaccatgaccgtcccctctgaggtctcccgaacacttgcgacaatagcagcatgtgggggcagccgccagaggcgggcatccttgtctcgacaaccattgacctccggattcgatatgtgcataatcatagtcgtgccaacacgaaacgtgtacgtctcggaagacgacctagacctgttcgccgaagccaccgagatcgctggaggcctgtccgcagcggtgttggaggccttgcgcagctacgtagacaggcaccatcgcgcggccggcggattcgacgagatcgagctggagctgcagaacgacggtatcgaccaccgtgtcaccttcatgggtcgccgcctgatacacatccgccgtccagatcccgagggaacccgcatagacactgtctacttgaccgccaaacaccaattcgccgttgccaccaaaatccaacgacggctgccagactggacgaccggccacgagcacatctggtccgacccggagacctggaatcgggagttctggatcgcaggtgacaagacgatggccgtgtatcccagccttgacaaactccgcgaagctgaccccaatgtggccgaacgcgccgaggccacggtcaaaatcccgccgttcgaggtcctggacatctgatgacagaatcatcatcttcccggcggcaattggcaatgccggtgctgtcagtcacggatctagccaagaaatacgtggttcatggcggctacgaggtcccggcactcaacggtgtctcgtttgacctgcacccgggagagatgctgggtttgttcgggccaaacggtgctggaaagacgacgctggtcaggatcatcgcgggcctcttatcggcagattctggagacgtccactggggatcggatcaaggtcgggccaggttaggctacgtgtcccaaaagggtggactgcagtacgggctcacgtgccgggaagagatggtcttccacgcacaatgcttcggccagtccgccaagcaggcccggactagcgtcgacgaggtcgccgcgatgctgcactgcgattacctgatggagtgggacgtcggaaggctctccggtgggcaacgccgaatcatcgaggtagggctagcactcgtcaatcaaccatcggtcgtcctgctcgacgagcccaccctgggcctggaccccgcaacacgcctgtcgttgtggcaaacggtaaagtcggcacgccgtgagaccggtgctgccttcctcgtcaccacccactacattgacgaggtggccgagcacctgtccaacgtcagcgtgatcaaccacggaaccgtcgtcgccaacggctcgccagcgcacatccgagaaatgttcgcgaccggggaagtaacgctcggcgtggccgaggatacggtggacagtgcggtggacgtgttggctgggaccgcgttcgaggcgcaccccaccgaaaccgtcccggggatcgtggtcaggtccaggcatcccgacgtggacgcggccaagatcatcaccatcctggctggtcatggcatctcggtggactccatatccgtacgcgaggcgaccttggaagaggcgtttctcacgatcacaggcagtcgagacccggagaggcaaatcccatgaacacttgcttcaggcgatatgcggcgatgtcgctgagagcgcggcgtgatttggccctgacattcatccagcccctcgtctacctagccctcttcggaccgctcttcgtcacgacgatgaagatgtcgcagagagctaccgccgctacgggttactccctatacatcacgggcctgtccatccaaatggccatgacgatcggtgccttcgcggggctaaccatcatcctcgaataccgactcggcatcctcgaacggatctggagcacccccctcacggggagcaagatgatggcggggcgaatcgcgcgcgacgtcgttatgatgatgatgccgatactggtcgtcttcatcatcggcctggtgctgggaacacgccccagcccactgggcctggcgacctacttcgtgacagtgctcggcacaggagccacgttcgccggggtctcctacgcggtggcactcagaacgaagagcgaggcagcgctatccgcgatcttcaacctcatcctgctacccatcctcctgctgtcggggatcatgctgcccatgtcgttcgcaccacactggatcgccaccgctgcccacgtgaacccgttgtggtacctggtgcaaggcgcgcggaaccagttcagcgttctagggctcgtggcggcggccccatggagttgggctgtggccatcgtcatgtcagccgctgccttcggctgggcaagccacgaattcaacaagaggcgctgacacaaagaatggtgccgggaacccaggtccccggcaccaccgagtgcactcgcgacgtcaacgcaccgttgcggtcactgcgcaggtcgagcacgaggacgacgagcccgcgctgctgcaggtcgagccgccaggcgcgagcaggtcgacgttagcgtcggcgccgccgaagacggacgtgacggccggctgagaggtgcggatgcggtgctccagcgaggaggtggtggtgagtttcatgggaggtgctcctaggagtgagacgagaacaaaccctagcgataggttagcagtccgcaaccgactccgggaatagtagaagcgcgcatccgtagcggaagaccttagcctgattacagtgaccctgttcgcgtctcaacattattccacacccccgagcagcgaacgacaccgcgatgatgatccgtcgcctctccaccgaagaactccgcgcccacatcgcaccgggccgccgtcccgtgcatcagacctgccgtcaacgtcggccatgaagctgggaaggtggctctcgtctaggagcagacgcgggacgcctcctccaggttgggccggggaagtgtccggttcttgatgtaggtggcggtccctattgatgggcgttgaccgtgggaatgcggtcggcgaagggggtggcgaacccgttgagcgcaggcttccagcgcatgcatcaacgctgtctgccggccaccggcaagcctcacccgcccgtcatggccatcatcgaggtgccggtgaatcctcgacacatgatcccaactcccccggaggggcttccggggctgttcagccaccagatcagccaggcggcgagcccgactctgccacccggaccctgcagagcgtgcctgctgccgtcgtgtcgtgtcgggccagtgggccaccagatcggccacatccgtcttggcccatctccagcccgccagacccagggaggccatcacctcatcgacgccgcgccgggtggtctcatcaaccccgtcaaacagctcgggccacctcgatgatgccgtccgtgaacgatccagattcatgacatgctcctcttcacagatgccgacgacgatcaggccgtggccgtggcaacggggtgacctgccggcgcggctcacgacgttgagccggaaccacacgagacgcaccagtgtgctgcgccgtcttgagtcgggcgctgtactgggccctggcgctgtggtgaacagcccgacgaagcaccgaccgccggctgtcctcatcgccagggcgaggcatggggcgcggcatggtgcgcccggtagcagcatccatgagggtgatccggtcagccaaaatgccgagccggttttcccacttccggggccacggcaccagcaggtcacgctgacagcccacgccgtggcgtcggcagtccacaacattttctcacggccaggatgcgagtgcagcagctccaccggaacaccagcatcacgcacccgccgcatcgtgacctcatcctcacgtgccaccagcgggggagagcgactaccgctgcagccggtccaaagcgactcttcacagatgagggggtggatcggtagctgacccctaggtcctgatgtgggtcgaggtccttg

SEQ ID NO: 102 - DNA, 599 bp, Propionibacterium acnes; identical to SEQ ID NO: 100
  source 1..599: mol_type = genomic DNA

SEQ ID NO: 103 - DNA, 17061 bp, Propionibacterium acnes
  source 1..17061: mol_type = genomic DNA
gtgttccagtgcctcgcgggcgtgatgttcttcttcggcaccttcttgccacatgcttcgcgcttcagcctcgccatccaagcgaacctggactgtgaacgagtcctcatcgggtccgtcctcattccacgcggcaatgatcccacgggcctcgtctgcgacctgactcaacttcatcgcctgcccgacagccccgagagccggaatctcgaacacccagatattcgcctcagccgagacctcacgatgggcgatcacttcgtaggtcgtctcaccttctactgtcgtgtccattacttccactccttcggaattttcacgcctgctcgctccagctgtgccaggacaccaactgacgtcagctggtgtcctgctggtatcgatacgcgcccggctccgccggggcgtccccagatttcatggcttcccttggcgttccgcagacgggcccatccttgagaacggagcagcttgaggacgtccttagttttctgcggtttcacacatcatagtatagccccacttaacttgtaaactaagcccctgtttacattttagttggtgcatgtgatccctgctcttatgacgtcgcccgacctggcgccttagacatgcactgttcatcctcaaccacactcaccgtcacgggtccgaaggcgaggtctatcaccattcgcatcgatgaagttgaagcaggatcgtccgcatcacgcactgccgatccggacagacgccaccggccgtaccgactgtttacgatctgccaccgcagactgctgccataaccgctatcacctctgatagtacgtttagtactatcagaggtgattcaagattctcctgtcgagcagccctacagtcacgaagtcctgcgatcgtcatcgcttaaggcagacggatggccatcggggaccactcgcaaagcaggggcgatcagcaacagtgatgtgccatgagcaagtactggtgcaccggctgtttactccgcccctagataaaccacgggtgcaggggtggacaccacaccatgaccgatgtggtgcccaccccatggctcacaggcaggccctatcgccgggagcactgctgcagatgaggctcagtaacctgccatgtctcacctggggccaaggtgccaagctccccacggaatctcaggcatcggaaaccagcagccgaacttccacagcatgagcgccctacgaaaaagcaggccgccgacggttctcaagaactcgccggcggcctgcatcgccactcgaactgtaaccgtggtccgaccccgtgcacaggtaagctccacactcccaccaggcatggccgaggcagtaccaagttgccgtggcccatcggcagatttggttaaattttgaaaagtcatatagactccttctgtaaatttttaaatctcataggactctcgccatcgccagccagcttcgacaggagtcccgatgtttcaccgagtgaaatatcggcaccgtttgagttgacctaaagctcaaaagatgctagaatccatcttacctcgttaggggcgttttgtcaaacgcccctatattgcgtgtcttcgcgcgtcgtagcgctgatgctgcgcctgtgtcgactatccgtttgtaagtactttcgatgacaccagcagtggctactcatgactggtgcgtgcgggtctaaagcagcagggaaaggaatcgcagtagaagccgcttgattcctatcacccctgatggtactatcagtactaacagagcagggcttactcgatgcgtgagaatcggggacatgctgagcctctcgtaggtcattggcctgctgggcgtcagtgtggcgcggttcgatccagtgaactctatcagctctgttagtactgtcagagttgatatattcgaccccaggaggagcccatgagttacatcgttcgcaccggaaatttggtcgacacccccgagctgcgtgagggagagcatggcccgtacacctacgctcgcgtcatcgtgtccgatcgcattcgccaggaggacggcagctacgtcaacgggccagcgatcgcctacgacgtcttggcgggtggcagccaagccgtgaatctggttgaagccgccaaggcgagcggcaacatccgcatcatgttcgcgggccgttaccgcgtcaccgagtggcggggtgagcagggcactcgtatccagcatgaggtccgagccgacgaagtgagcgtgagcctgctcggtcagagggtgaccgtggagcggcctcgaggtgacgtggcatccaaggagagcacgtcgttctgattgagtccgggggcacggtggtcgccgtggtaaaccgtgcccctgacagtactattgacactattggaggtatcagtgtgactgctcaaattttcgccttgtgcaaccagaagggtggcgtcggaaagtcgacatcgacgtttcatctggcccgtgccgcggtgttgcgtggccagcgtgtgcttgtcgtcgacaacgacccccagggcaacctgacgtctgtcgcggccgccgagcccgtgggggaggatcaggcggggctggccgatgtgctcagcgcgcgtgctccagagaccctccgcgatgtgatcgtgccgggaatctggtctggcctcgatgtcgtgccgacgtctggcatcacgctcggctgggtgcgtgacgaactcgtgatcgccggtgccggccgagaaggccggctgcgggaggccctggccggcgtcgaggacgactacgacgtgatcctgatcgactgtgctccatcgctcgatcagctcacgatcaacggcctggtggccgcccagggtgtcatcgtcgtgacgcactcgaagttgtggagcgccaacggcctcgcccagctgctcgacaccatcgacagcgtgcgcagctactacaacggcgcgctgcgcgtggcgggcatcatcgtcaaccagcacgaggagaacaccatcagcgggaaaacctggctcgacgagctgcatcaggctgccgagtcccggaagctgaccgtgcttgacccgccgatccccaagcgtgtcgtcatcgccgataccgtcgaggccgcgcgcggtctcgacgagtggggaagtgccgaggcggccgcgctcggccagttgtacgcccaccacctgacctgcatcgaaggagccctgtgatgacccgtccagccccccgaaagtcctcattgagcggatcaactccggtcgccccgccggctcagacggcgccggcaccgtctgccgcacctaccccccacaaggccgatgagtcacagacgagcagcaccacgaggaagtggcggcacaaggtgtcgttctaccaggacccggccgacaccgaccgggtgcgcggggcgatcctttacacgatgacgaccgagggcaaccggaacctgagccagttcgtcaacgatgccgtcatggccaaggtggtcgagctggaagtcaagtacaacgatggccagccattccccgctgtgggagcccgaggactaccccagggcggtgcagccgccgccggtgagtagaggaccatcgaccgtcgggggcttcaccatgcccccgaccctcggtcatcctgatcctcttgtcgatggtggtgacagtgggggattcacgcctcgttcagatcagaggaagtctcaccgcgtgattagtactatcaaatctgacagtactaacagagcagatagggttccctaggtcgagctgtatcacgccgacaaccagtgagccagtgatctacgaggggcgcaatatgcacccgatcggtagccgcgaaggcctcgccctgccccgatagtactatcaccactatcaatggtgctagtggtgagtttcttccattgatgacaacagcacagtgctgccgtctgtgtgcgggccaccagcccgcacacagttgccgtcgaggacgttgttcatgctctgtggtggccggtcctgagggcggctcgcaggatctcccggcgctcacggcgacgagcctggtagccaaggtctgcatgttcggcggcgagacgggctttgagggttgcggcttctgcacggcggtggagttggtcgtcgatgagttgggcgcgggccagacgccgcttatgggggttgtcgtgggtgaggggggcgtcgaggctgccgtcgtgggttagggccagggctgctcgttcggcgtcgtcgaggccgatgtggtggacggtcacgggtgcggtggtgacgtcgaggatgtccaggtggatgttgtggccgccgccgggggcttcggggaagtctggtgggctggcctggccggtgtcggggtcataccaggacaggccgatgatctcggcccagggtgggggcgggcagacggctcgcagaagggtgtgggccaggaacgtgttgcgggccatgatgcctccaagggtgaaaagcagtcgagtagcgatgacggcggggtagccgtctgctgggctgaggccgaccgggcccatgtcctcgatgctcttgtgctgcggccataccccaaagctaccaaacagtctttttaatctcaaagatacaaacagtgcttgacatattatctgcagcgaaagatactttcatcatggtggctgatcatgattacgcgactcctgacgatgagtggatgacacctcctcaggtggcccgtgtgattccgaacaccactgctcaggctgtccggcgctgggctgaggagggtcagcttcctggggcgtttcgtactccttctgggcgttggcatattccgtggtcggctgtggtgggcatcatggggtttgatccgcgtgagtccgcatcaccgagtgatcgtcaccagagctgacagagtcgtcgatgagctttcgagtgcagagctgatggcacgacggtctggatacttgtggagatgagagacgaccacatccagtcatggtcggggtacaccgaggggcagattcagcagtgctggcacgatgaggttgcccctgccattgactcgctcatggagcaggtaaggtctgttgccgagactcctgtgccgccgggttcgagattttacggcgatgagcagtgggccaagccttttcatccgtctactgcgatctgcggttcaatgggtccgccagcgatcacttgcacgcgctgaagctcctcgtctgggaagcgaacgtccaccatgtctatgcgccgtacacccttgctcgtgcatctattgaggcatcgtctactgctgtgtggctgttgagcacgaagacgcgcggagaacgtgtgctgcgagccttgcgatggtacgcgcaggattgtcacgactcgtgcaggttcatggatgatgagcagtatcgtgaccacctattgcggcgcattgaggggactgtcgctgcgggaaatctcgactcgcgcgctgctaggaaacggtaccgtgcaaccgatgttgtcgatgaggctgatcagctggttcccggaactctgagggcgtggcgagctttttctggtatggcccattcccgtatgtgggcatccagggggctgctcgacatggaagtgctgtccagtggccaaggaatggttacggcgaaggtgacgagcggatcggcccaaatcctttgggccgtcgtggcagctctgaatgttgctctcagtgccgctcgcttgtggcgtgattcgatgtgctcaccgtttgctgttgcccagtcggtagacgcgatgccagaggcgtttcgccgccctgtttagggtctgatcggggtagtgggtgttcacggggtcccaggttggccatggggcggcttggtgatgtgagttgggttgtgtggcagcctgggtgttgggtgtggcttcgttggccacgaaggcatgctcttccttgtgctgggacttgagtccccagtgctctcccctttgctagtggggggtggggtccccggaggtaggtcctccggggactttttctatgtctgtccgtgccccaggatttcgtatctaggcagtaccaattttgggttagttggaggtttctttggtaatggacagggtgagggtgatgaagaggtggccgtccttggtggcagaaattttctcgaacttcagctgaatgttgttatcagccactatctgttgggcggtgaggtgctcggagagcttctggaatccttcgcggatccacaggttgtaggggttggtgaccgagaccgaagggtatgggtcgaccttcagcgtcaggactggctggtctgggttgagggagttgatcttcaccagtttggggtaccggtcgcactcatgtgtctcttgtgttgggggccagcagtcgggggcccattcctcccagtggtcacgcatctcacgaagtactttcctgcatctcagcctctgcaggagctcgcgcgccaccgatgggagggctgccatgatgagggcaaggactgcgaacccgatgatgtaattgaccgtgtccctcgtcacgccgttcttgccgaggattccgatggcgaacgcgatgacgacaccgcccaggcacaggtgcatggggtcatgctgtgatggtttttcttcttcagcgactggtggggctatagtcatgtgtgccccttagtactaagtgatactggtgggttgcttttccccggtggccgtgtgcaagacggccaccggggttttccttcatgttcctgattttatctgcccggtgtggcgttttcatctttgtgtgggtggttcgcctggggtcttggagtgtggtgacgcggtgatggtcacggtgacggtgactgtggcgcgtggcgggtgaggtggttctttcctggtctggtgtgtggcccaggtgagtgtggtgatgagggccagggtgaggatgatgaccagggtggggagtagtttgtctggccggtgtcgccgggcttggtggcgcggcatgtttttccagggtgtgtctccgaacaggtcgtcgtcggaggggtcgtcgtggttcatagggtggccttggcgatggtggtgggcgagtttggtccaggtgatggtgccgtcggaggcgatgtggcggtcggcgggcagggtgtggacggtccatccggcgtcggtgagggcggtggtgaaggatttcttgatggatcgtttgggtaggtcgatgggggcgtgggtgccgacccagatgcaccggtttttgaggtgggtggcgccgaggtggttcatgtcgcggaccatgttttgggtgagtgtgagggtgtcggggtcccattggacggggatgatgatgtggtctgcgatggtgatggcgtgttgccaggcggcgtcgaggtcgttgtttccggtgtcgaggatgatgacgtggaagcggcttcttagggcggtgatgatgcggtcgaggtcgtcggcggtggggggtgtgatgaggctgttgtggttgtcggtgatggtgggtaggcatgtgatggtggcccagccttctggttgccaggagatgtaggggccgaggtcgcggggttgggaggcgaatcctgggtgacgggctgcgcgggcgaggtcgatgacggtgttgtcggtgtggcggggtgcgcgggtggagagggtgccgcgtgggttgatttccacgacgacgatgtcgtcgtgtcctgctgtggtggcgagggcttgggcaaggatgacggccagcggggttttgccggtgccgcctttgaggttggcgagggtgatgatgtggtcggtgagttgggcgggtgcggcggtgtggtgagggttggcggtgaggttggcgatggtgaacagggcatcgagatcgtcggtggtgttctgctcggtgggttgggggtcgccggagatgatcgggtcggcgcggcgcggctgccatgccggcctcaccactgtcacgaccaccacgggtctgctggcgctgtgtgggtgtcgtcggcgatgactcacgatcggcagtctcaccatcgtctcggtgatgctcggctagcgctggacccggtcaagttcgggccggctcacccagtggtgatgactcggtcacagaaccgctgccggtcgttatctcggacgtctcgactcctccagtcctgatgggcgttggagccacctacacctactctcagaacgaccccgacctcgtgtggggcgggggcagatgtcacttgggccaatcgagagcccaggtgatggggaaagcaggggtgtgatatctgtcctggaaaactgggcagctgctaccgtggattgacggatctccacgaaagaagggaatgcgaccatgcagatcaccgtcaagaccatcaaagatcatcgggttcgcactgtccagaccgccatgagcagcgccttggggattggttcccaggtagacatgctcgcccccggcggttccaccagctcgagttccggttcatgctgctcgtgctcgacctgcgcggtagtggcgcagcctcaagactgaacggctggtcagccccaggggcgtggcgctcatcgcgtcacgccccttctattcgctggacagggtgcgcgagctgaggaacatcgcggtgtgtgcgatgacgaggggcaggagcaagtctgtgcgggttgccaagtagccctgcgcgatggccatcacgctggccccgacggcggcgaagacacctccgatacgtcgcttcatgccgccgaattgcatcaggacgaataggactcccgcggtccacatccctccgggcatgcatctgggaaagatgaaccggaagatgatctcttcacaggagagctggagtactagcagcgtagcccccacggggagactcacctctactgacagacggatcgtcttcatccacccacccgagctggcatcgaccatttcggtggccatgcgcgaccggtggcctcgtgcctctcgctgcgtgtcgatccagccgagcagtccgtggacgctctccgctaggactcctgacgcgacagtctcaccaattcctaagcccacggcgaggaccgcgacgcccccctgcacggcaggctgtgtgacttggtggtcccaccaacccgccggcaggaccatgcgtgcgaggctgcacacgagcaggaggtggagggtcacgacgagcgacatctggaataccgcttgccgttcggcgatggtggcgttgggaaagagcggtaggccggcacgggcagcggcgctcgacagcttccgcaagagcggtttggagacgaagtagtaggcgacgtacagcgccagcgctgtcgcgatgatgatcatcggtctgccaccgagctgacccgccgatagccgtttctgttccaccaatactggctgttgtagatcaggtggcccagaacacaggcccagatcccccagaagatgaacaggatagtccccaaggcggcgagcgggatcttggagaggacctgtccccgtccgaacaccgagtggccgcaagcaaacaagagtgctcccacagcggtgagcgcgagccaggccggggttgctcgcagactgatcaccgggaccccgacccggaagccgacctcttctcctacagcgatgactagcaactgccacagcggcatgttctgaacggagcgcgcgactcgggctcgagtcacccacacgggctgttgagcgctcacatcaccactcaggtaccccggtgaggcacttcgcttagtactggggcccgatgtgcgagcattcgtgatgtgtcgcaggatccggttgtcaagccaagaggccagcagggctccggcgacagtgacgggtagcccgatcagcacgaggccccagccatgcggtgccgagaggtttctggccggcgtgcacgcgaggcaggcaaatgccatcactgccagcactacgacgtagatggtcgcataattcgacttgcgggtgacgttgccgaccatcttggccaaagtcgctggggaccagctgatgagtgcgatggtggtcagcaggaagcaggaccagacagacatccggcgcactcaggggtatgggtgcggctgtgggttttggaaaccgccatatgcggcgtagcgggggtgtgcccgcatgggtgcgctgggcagtgacagggcgagcagcccaggcgcccagagcctgacacagtgcagtcccagcccctggatctctatggtggtgaaatcttcgatgtacaggggtgacacacaggtgatgctgttgaccacgctctttaccagttccgcccccgtgtgggtgtcgtcaggtggcaggtcttcggcttgggcaatggtgcccgcgtcgaatttcgccacaactgattgcgcggcctgatagttcctcgcgtagtaggagacgttcgagtcgaggtcaagcatgtcctccgtggacatactggacgcgtcggcctcggcgtcgaaagacgtccataccgcgagcatccgaaccccgctgcactcgagaaacgccttgtacatggctgcttccagacccgcgtctgcacctaggccgacggcgacgaggggaagttggttgccactaccgaccatcatgcatgccacggtgaaatgcttgagcccgggagtcggaagccagtagaaacgcagttcgtggcttcggcccgctgcacgttccacgagccgctggatgcgctggaggcggggtccttcgacgcggatgcgcacaggtgacgaggctccataccacaggcccatcgcggcatctacctggatcaattcataagccgcggacagcgttgcggcgacgcgtgaagtgtggacggcggtgccggtcgtcacggccgttcccagccacggctcaccgtcgtgccgacgggggttgtaacccaggtaaaagaactgcgccgggatccactcctgccgggaggtcccgacacggggagtcttgacccatgtcatgggcaagtcgtcgcgataggtgtcgaacgcacctccagccactcgttgcgcgaagccgaatgcgcccagatcgagaacttcgtcctcggtccgggcgaggagttcctgacgagtcgcccagcgccgttcgaagggactatggagaatcccggtacccgcgcagtagcgctcgacggcctccgcgtagaccttgatctctgcctcaaactcgttcagccccaccccaccgatgtggtagctacccggcttggggtcgggccggtcaagcagtgcgtgcatccccgtgagttccccaccgttcacccgcacgcgggggccgagcgcggggtgcagcgagtagccgacggaagtcaccagcccgcatagcgggctgtaggtgcgccgcctgagccgggctgcggtctcgacggggtcgctatcctggcgaagcttcatcgctcgccccctgccgccagccactcacggatgtcgtagtacaggtccggagcggtttcaacctgcgctggtgcatcaaaacgggacataggtaggacgtcgttgtaggcgatctccatcgtcggtatgtagaccgacaacactttgttgcgcgtcgtgttgaggccgttgcgggcgatgctgacagcctcatgcgcgacgtgcgcggccaagatcgcgcgcaccgacgctgccacggccggcgctccggcccttacgcggtcggcagcggccacccgcatccaggacaggtagctctgccgttcgcgcaggttcatcgcgacccgctgctcgaaggtccggtaggacgaggtcgcaccagggacgacgtagggacccacgtacaaggccggcccgtctacagctgcgtggagccacgacaggtgggcgcgtcgggcgaacaggtcaagggcgcgcagcatagccgggttgttctgcgccagcgctaccacaaggagtggctgcaggtccggcgccgaacccagcaacgccaacatctgggaggcctcctgctccatgtgcaactcgtcggccgactgctcaagccgcaggcctgcgaagagggtggctgatggctgcgtgtcgtcagcgaggacggtagcctgcagcccctctccctcgagaatctgctggatatcgccggcgaggagcgcgtcgtcgctgaatacccacaccgggcgcgtctctctacctccatccatcttgtcctcaacgttttcgaccagcgcaccgatcgatgctaggtgggccatcacgtcgtcaagggccgcgcgggtcaatccgggcacccgggacacgatctcgggcggctgcagtccttggctcaacaagtccaaggccggccacagggtcccggtggcgtcgtcgtcctccagcgttgtgctctcggcgttccagacgcctcgacggaactccaccctgtccatcgagtaaggcaccatcatgaggcccggtgaaatgtggttggtcactttggctcctgtacagcctaggcttggacgcccacggtcatggtgtgggtcgcggtttggaaaatcccgtcgaggttgagtgcctgattgagttcgtcctcgtagaagcttgaggactcgactgaggcaagaccgagccccgtgcagaccaagttgatctgttgtgcgatcgccccgacttcttgaagggcgaacctcaaacccctggctccgtacttccgcatcgccctccacggcgagatgacgaacaccaagtgcactccggccgcatccgattgctccacggccggctcgccggccatcgaattcctcacgccgcgacagccctcttcaccggtcacgggcaccagtcgatcgatgaccggcgagtagcggtagacgccgcgactcaagccggacacccgttgtgcggacatgaagatagacacgggatacagccctccaccagacgggacagcgcgtacattataccgcacgatatcaccgctcgaacgtgggacatccacgtgccccgtcacaccggcagcacctctcagaaacgcagctacgtcacgcaggtctagggattcgccggtgtagttccgtccgctgcgccggcgggcgatcacttgctcgaggggtgcgcgcaccctgctggacctgggaagttcgatcacatcggcagcgaacgtgtcgcgatccatctgtccgtacgtaacgatcatggggtcaacgaaatagtcgccgaccgagacgttgaactccatatccccccgggcgatgcgcgaggcgagcaagaagtctgcagctgcgttagacagccccggcccatcagtgttgtcgcagcggaactcgtgggtccgaaaccccacaccttccgtgcccgggctctgcgctcgatacgacgtgatcgcagaactagccttccttaaaccgcccggagtagctaccatgaccgtcccctctgaggtctcccgaacacttgcgacaatagcagcatgtgggggcagccgccagaggcgggcatccttgtctcgacaaccattgacctccggattcgatatgtgcataatcatagtcgtgccaacacgaaacgtgtacgtctcggaagacgacctagacctgttcgccgaagccaccgagatcgctggaggcctgtccgcagcggtgttggaggccttgcgcagctacgtagacaggcaccatcgcgcggccggcggattcgacgagatcgagctggagctgcagaacgacggtatcgaccaccgtgtcaccttcatgggtcgccgcctgatacacatccgccgtccagatcccgagggaacccgcatagacactgtctacttgaccgccaaacaccaattcgccgttgccaccaaaatccaacgacggctgccagactggacggccggccacgagcacatctggtccgacccggagacctggaatcgggagttctggatcgcaggtgacaagacgatggccgtgtatcccagccttgacaaactccgcgaagctgaccccaatgtggccgaacgcgccgaggccgcggtcaaaatcccgccgttcgaggtcctggacatctgatgacagaatcatcatcttcccggcggcaattggcaatgccggtgctgtcagtcacggatctagccaagaaatacgtggttcatggcggctacgaggtcccggcactcaacggtgtctcgtttgacctgcacccgggagagatgctgggtttgttcgggccaaacggtgctggaaagacgacgctggtcaggatcatcgcgggcctcttatcggcagattctggagacgtccactggggatcggatcaaggtcgggccaggttaggctacgtgtcccaaaagggtggactgcagtacgggctcacgtgccgggaagagatggtcttccacgcacaatgcttcggccagtccgccaagcaggcccggactagcgtcgacgaggtcgccgcgatgctgcactgcgattacctgatggagtgggacgtcggaaggctctccggtgggcaacgccgaatcatcgaggtagggctagcactcgtcaatcaaccatcggtcgtcctgctcgacgagcccaccctgggcctggaccccgcaacacgcctgtcgttgtggcaaacggtaaagtcggcacgccgtgagaccggtgctgccttcctcgtcaccacccactacattgacgaggtggccgagcacctgtccaacgtcagcgtgatcaaccacggaaccgtcgtcgccaacggctcgccagcgcacatccgagaaatgttcgcgaccggggaagtaacgctcggcgtggccgaggatacggtggacagtgcggtggacgtgttggctgggaccgcgttcgaggcgcaccccaccgaaaccgtcccggggatcgtggtcaggtccaggcatcccgacgtggacgcggccaagatcatcaccatcctggctggtcatggcatctcggtggactccatatccgtacgcgaggcgaccttggaagaggcgtttctcacgatcacaggcagtcgagacccggagaggcaaatcccatgaacacttgcttcaggcgatatgcggcgatgtcgctgagagcgcggcgtgatttggccctgacattcatccagcccctcgtctacctagccctcttcggaccgctcttcgtcacgacgatgaagatgtcgcagagagctaccgccgctacgggttactccctatacatcacgggcctgtccatccaaatggccatgacgatcggtgccttcgcggggctaaccatcatcctcgaataccgactcggcatcctcgaacggatctggagcacccccctcacggggagcaagatgatggcggggcgaatcgcgcgcgacgtcgttatgatgatgatgccgatactggtcgtcttcatcatcggcctggtgctgggaacacgccccagcccactgggcctggcgacctacttcgtgacagtgctcggcacaggagccacgttcgccggggtctcctacgcggtggcactcagaacgaagagcgaggcagcgctatccgcgatcttcaacctcatcctgctacccatcctcctgctgtcggggatcatgctgcccatgtcgttcgcaccacactggatcgccaccgctgcccacgtgaacccgttgtggtacctggtgcaaggcgcgcggaaccagttcagcgttctagggctcgtggcggcggccccatggagttgggctgtggccatcgtcatgtcagccgctgccttcggctgggcaagccacgaattcaacaagaggcgctgacacaaagaatggtgccgggaacccaggtccccggcaccaccgagtgcactcgcgacgtcaacgcaccgttgcggtcactgcgcaggtcgagcacgaggacgacgagcccgcgctgctgcaggtcgagccgccaggcgcgagcaggtcgacgttagcgtcggcgccgccgaagacggacgtgacggccggctgagaggtgcggatgcggtgctccagcgaggaggtggtggtgagtttcatgggaggtgctcctaggagtgagacgagaacaaaccctagcgataggttagcagtccgcaaccgactccgggaatagtagaagcgcgcatccgtagcggaagaccttagcctgattacagtgaccctgttcgcgtctcaacattattccacacccccgagcagcgaacgacaccgcgatgatgatccgtcgcctctccaccgaagaactccgcgcccacatcgcaccgggccgccgtcccgtgcatcagacctgccgtcaacgtcggccatgaagctgggaaggtggctctcgtctaggagcagacgcgggacgcctcctccaggttgggccggggaagtgtccggttcttgatgtaggtggcggtccctattgatgggcgttgaccgtgggaatgcggtcggcgaagggggtggcgaacccgttgagcgcaggcttccagcgcatgcatcaacgctgtctgccggccaccggcaagcctcacccgcccgtcatggccatcatcgaggtgccggtgaatcctcgacacatgatcccaactcccccggaggggcttccggggctgttcagccaccagatcagccaggcggcgagcccgactctgccacccggaccctgcagagcgtgcctgctgccgtcgtgtcgtgtcgggccagtgggccaccagatcggccacatccgtcttggcccatctccagcccgccagacccagggaggccatcacctcatcgacgccgcgccgggtggtctcatcaaccccgtcaaacagctcgggccacctcgatgatgccgtccgtgaacgatccagattcatgacatgctcctcttcacagatgccgacgacgatcaggccgtggccgtggcaacggggtgacctgccggcgcggctcacgacgttgagccggaaccacacgagacgcaccagtgtgctgcgccgtcttgagtcgggcgctgtactgggccctggcgctgtggtgaacagcccgacgaagcaccgaccgccggctgtcctcatcgccagggcgaggcatggggcgcggcatggtgcgcccggtagcagcatccatgagggtgatccggtcagccaaaatgccgagccggttttcccacttccggggccacggcaccagcaggtcacgctgacagcccacgccgtggcgtcggcagtccacaacattttctcacggccaggatgcgagtgcagcagctccaccggaacaccagcatcacgcacccgccgcatcgtgacctcatcctcacg

SEQ ID NO: 104 - DNA, 1527 bp, Propionibacterium acnes
  source 1..1527: mol_type = genomic DNA
accagatcggccacatccgtcttggcccatctccagcccgccagacccagggaggccatcacctcatcgacgccgcgccgggtggtctcatcaaccccgtcaaacagctcgggccacctcgatgatgccgtccgtgaacgatccagattcatgacatgctcctcttcacagatgccgacgacgatcaggccgtggccgtggcaacggggtgacctgccggcgcggctcacgacgttgagccggaaccacacgagacgcaccagtgtgctgcgccgtcttgagtcgggcgctgtactgggccctggcgctgtggtgaacagcccgacgaagcaccgaccgccggctgtcctcatcgccagggcgaggcatggggcgcggcatggtgcgcccggtagcagcatccatgagggtgatccggtcagccaaaatgccgagccggttttcccacttccggggccacggcaccagcaggtcacgctgacagcccacgccgtggcgtcggcagtccacaacattttctcacggccaggatgcgagtgcagcagctccaccggaacaccagcatcacgcacccgccgcatcgtgacctcatcctcacgctgccgatcaccgtcaaccagatggtcagccacgatggtgttcacaccccatgactcatgcagttgcctggccaaggcgcccaacacctgctgacgcacctgtgacttgacgtcatcatcctccagatcctgtgtaccaaccatcacggaggccaacacatcactgcgttgctgaaccagggtgttgacgacgtcgacatcgtcgatacccatgggattgttggcgcgcgcggccacggcatgaaacgtgttggactgcaaattctcgaccagaccacgccgatagtcgttgaactgggaggtgtcggcaatgacaccggtcatgatgtaggccgacccctcggacaaggccctgtaggactcgtcgacgaacgccaccaaccccggccgccgccggtaaagtcgacctgcttcctcgtcagccagcaaccatgacagtttttgccccatatgtcctccttgctgacatgacctcgaacatggtaaactttccgtaggaaaaacggggcaagtactttcgagcggctacctcggcccccggtgggctgtccagccttgtgcggaccgaagccgggggattccttatgtttgcggcaatgatgccgctgcaccccctcatgccgtggtgtggtcctttccccgtgtgcggtgtggtgcgtcgttgactggtttgtggccccgagccttactctgaccggtaggagaacggtgtggggtctacggatagcccactcggctcccggtggaatgtccaacagggtagggttgatgagttggtccatcaggaccgtcccggtggctgcgtcaatgatcgatatttcgatgatgcgcccgtccaggtcggtggtttcggtgtcgaggatgactccgactccgggttctaggagttggggatccaatgggtggtcatcgtgtggctcctacaggg

SEQ ID NO: 105 - DNA, 17061 bp, Propionibacterium acnes; identical to SEQ ID NO: 103
  source 1..17061: mol_type = genomic DNA

SEQ ID NO: 106 - DNA, 2003 bp, Propionibacterium acnes
  source 1..2003: mol_type = genomic DNA
accagatcggccacatccgtcttggcccatctccagcccgccagacccagggaggccatcacctcatcgacgccgcgccgggtggtctcatcaaccccgtcaaacagctcgggccacctcgatgatgccgtccgtgaacgatccagattcatgacatgctcctcttcacagatgccgacgacgatcaggccgtggccgtggcaacggggtgacctgccggcgcggctcacgacgttgagccggaaccacacgagacgcaccagtgtgctgcgccgtcttgagtcgggcgctgtactgggccctggcgctgtggtgaacagcccgacgaagcaccgaccgccggctgtcctcatcgccagggcgaggcatggggcgcggcatggtgcgcccggtagcagcatccatgagggtgatccggtcagccaaaatgccgagccggttttcccacttccggggccacggcaccagcaggtcacgctgacagcccacgccgtggcgtcggcagtccacaacattttctcacggccaggatgcgagtgcagcagctccaccggaacaccagcatcacgcacccgccgcatcgtgacctcatcctcacgctgccgatcaccgtcaaccagatggtcagccacgatggtgttcacaccccatgactcatgcagttgcctggccaaggcgcccaacacctgctgacgcacctgtgacttgacgtcatcatcctccagatcctgtgtaccaaccatcacggaggccaacacatcactgcgttgctgaaccagggtgttgacgacgtcgacatcgtcgatacccatgggattgttggcgcgcgcggccacggcatgaaacgtgttggactgcaaattctcgaccagaccacgccgatagtcgttgaactgggaggtgtcggcaatgacaccggtcatgatgtaggccgacccctcggacaaggccctgtaggactcgtcgacgaacgccaccaaccccggccgccgccggtaaagtcgacctgcttcctcgtcagccagcaaccatgacagtttttgccccatatgtcctccttgctgacatgacctcgaacatggtaaactttccgtaggaaaaacggggcaagtactttcgagcggctacctcggcccccggtgggctgtccagccttgtgcggaccgaagccgggggattccttatgtttgcggcaatgatgccgctgcaccccctcatgccgtggtgtggtcctttccccgtgtgcggtgtggtgcgtcgttgactggtttgtggccccgagccttactctgaccggtaggagaacggtgtggggtctacggatagcccactcggctcccggtggaatgtccaacagggtagggttgatgagttggtccatcaggaccgtcccggtggctgcgtcaatgatcgatatttcgatgatgcgcccgtccaggtcggtggtttcggtgtcgaggatgactccgactccgggttctaggagttggggatccaatgggtggtcatcgtgtggctcctacagggagtgtctgggctggacagcggtgcaatacccgcgccatagcggttttttctgcgggggtgacccacagctggtatttcgttttgacggcgatttggcgggccacgtagtcgcatctgtaggccttgttagggggtagccaggtcgctgcatccctgtctcgtttggcctcattagcgggtccgtcgacagccagcaagttcaacgggtcgttggccagggcggtgcgttgcagcggtgagagtttttgcgcgccggtaatccacgcgttcccgagggctacgacgtggtcgatttggactgttgtcgaggtgtgccggccgcgccgccaggcgagtgtggacccggtgtaggggtcgtggagtcgcccggagacgaccacgcatcgtgatccgggtttcaggtgggcctcgaccaggtcgcgggcaagggcatcgttgcgggtgtcgcatccgttgtggccccaggggcgggtcaa

SEQ ID NO: 107 - DNA, 17045 bp, Propionibacterium acnes
  source 1..17045: mol_type = genomic DNA
gtgttccagtgcctcgcgggcgtgatgttcttcttcggcaccttcttgccacatgcttcgcgcttcagcctcgccatccaagcgaacctggactgtgaacgagtcctcatcgggtccgtcctcattccacgcggcaatgatcccacgggcctcgtctgcgacctgactcaacttcatcgcctgcccgacagccccgagagccggaatctcgaacacccagatattcgcctcagccgagacctcacgatgggcgatcacttcgtaggtcgtctcaccttctactgtcgtgtccattacttccactccttcggaattttcacgcctgctcgctccagctgtgccaggacaccaactgacgtcagctggtgtcctgctggtatcgatacgcgcccggctccgccggggcgtccccagatttcatggcttcccttggcgttccgcagacgggcccatccttgagaacggagcagcttgaggacgtccttagttttctgcggtttcacacatcatagtatagccccacttaacttgtaaactaagcccctgtttacattttagttggtgcatgtgatccctgctcttatgacgtcgcccgacctggcgccttagacatgcactgttcatcctcaaccacactcaccgtcacgggtccgaaggcgaggtctatcaccattcgcatcgatgaagttgaagcaggatcgtccgcatcacgcactgccgatccggacagacgccaccggccgtaccgactgtttacgatctgccaccgcagactgctgccataaccgctatcacctctgatagtacttttagtactatcagaggtgattcaagattctcctgtcgagcagccctacagtcacgaagtcctgcgatcgtcatcgcttaaggcagacggatggccatcggggaccactcgcaaagcaggggcgatcagcaacagtgatgtgccatgagcaagtactggtgcaccggctgtttactccgcccctagataaaccacgggtgcaggggtggacaccacaccatgaccgatgtggtgcccaccccatggctcacaggcaggccctatcgccgggagcactgctgcagatgaggctcagtaacctgccatgtctcacctggggccaaggtgccaagctccccacggaatctcaggcatcggaaaccagcagccgaacttccacagcatgagcgccctacgaaaaagcaggccgccgacggttctcaagaactcgccggcggcctgcatcgccactcgaactgtaaccgtggtccgaccccgtgcacaggtaagctccacactcccaccaggcatggccgaggcagtaccaagttgccgtggcccatcggcagatttggttaaattttgaaaagtcatatagactccttctgtaaatttttaaatctcataggactctcgccatcgccagccagcttcgacaggagtcccgatgtttcaccgagtgaaatatcggcaccgtttgagttgacctaaagctcaaaagatgctagaatccatcttacctcgttaggggcgttttgtcaaacgcccctatattgcgtgtcttcgcgcgtcgtagcgctgatgctgcgcctgtgtcgactatccgtttgtaagtacttcgatgacaccagcagtggctactcatgactggtgcgtgcgggtctaaagcagcagggaaaggaatcgcagtagaagccgcttgattcctatcacccctgatggtactatcagtactaacagagcagggcttactcgatgcgtgagaatcggggacatgctgagcctctcgtaggtcattggcctgctgggcgtcagtgtggcgcggttcgatccagtgaactctatcagctctgttagtactgtcagagttgatatattcgaccccaggaggagcccatgagttacatcgttcgcaccggaaatttggtcgacacccccgagctgcgtgagggagagcatggcccgtacacctacgctcgcgtcatcgtgtccgatcgcattcgccaggaggacggcagctacgtcaacgggccagcgatcgcctacgacgtcttggcgggtggcagccaagccgtgaatctggttgaagccgccaaggcgagcggcaacatccgcatcatgttcgcgggccgttaccgcgtcaccgagtggcggggtgagcagggcactcgtatccagcatgaggtccgagccgacgaagtgagcgtgagcctgctcggtcagagggtgaccgtggagcggcctcgaggtgacgtggcatccaaggagagcacgtcgttctgattgagtccgggggcacggtggtcgccgtggtaaaccgtgcccctgacagtactattgacactattggaggtatcagtgtgactgctcaaattttcgccttgtgcaaccagaagggtggcgtcggaaagtcgacatcgacgtttcatctggcccgtgccgcggtgttgcgtggccagcgtgtgcttgtcgtcgacaacgacccccagggcaacctgacgtctgtcgcggccgccgagcccgtgggggaggatcaggcggggctggccgatgtgctcagcgcgcgtgctccagagaccctccgcgatgtgatcgtgccgggaatctggtctggcctcgatgtcgtgccgacgtctggcatcacgctcggctgggtgcgtgacgaactcgtgatcgccggtgccggccgagaaggccggctgcgggaggccctggccggcgtcgaggacgactacgacgtgatcctgatcgactgtgctccatcgctcgatcagctcacgatcaacggcctggtggccgcccagggtgtcatcgtcgtgacgcactcgaagttgtggagcgccaacggcctcgcccagctgctcgacaccatcgacagcgtgcgcagctactacaacggcgcgctgcgcgtggcgggcatcatcgtcaaccagcacgaggagaacaccatcagcgggaaaacctggctcgacgagctgcatcaggctgccgagtcccggaagctgaccgtgcttgacccgccgatccccaagcgtgtcgtcatcgccgataccgtcgaggccgcgcgcggtctcgacgagtggggaagtgccgaggcggccgcgctcggccagttgtacgcccaccacctgacctgcatcgaaggagccctgtgatgacccgtccagccccccgaaagtcctcattgagcggatcaactccggtcgccccgccggctcagacggcgccggcaccgtctgccgcacctaccccccacaaggccgatgagtcacagacgagcagcaccacgaggaagtggcggcacaaggtgtcgttctaccaggacccggccgacaccgaccgggtgcgcggggcgatcctttacacgatgacgaccgagggcaaccggaacctgagccagttcgtcaacgatgccgtcatggccaaggtggtcgagctggaagtcaagtacaacgatggccagccattccccgctgtgggagcccgaggactaccccagggcggtgcagccgccgccggtgagtagaggaccatcgaccgtcgggggcttcaccatgcccccgaccctcggtcatcctgatcctcttgtcgatggtggtgacagtgggggattcacgcctcgttcagatcagaggaagtctcaccgcgtgattagtactatcaaatctgacagtactaacagagcagatagggttccctaggtcgagctgtatcacgccgacaaccagtgagccagtgatctacgggggggcgcaatatgcacccgatcggtagccgcgaaggcctcgccctgccccgatagtactatcaccactatcaatggtgctagtggtgagtttcttccattgatgacaacagcacagtgctgccgtctgtgtgcgggccaccagcccgcacacagttgccgtcgaggacgttgttcatgctctgtggtggccggtcctgagggcggctcgcaggatctcccggcgctcacggcgacgagcctggtagccaaggtctgcatgttcggcggcgagacgggctttgagggttgcggcttctgcacggcggtggagttggtcgtcgatgagttgggcgcgggccagacgccgcttatgggggttgtcgtgggtgagggggggcgtcgaggctgccgtcgtgggttagggccagggctgctcgttcggcgtcgtcgaggccgatgtggtggacggtcacgggtgcggtggtgacgtcgaggatgtccaggtggatgttgtggccgccgccgggggcttcggggaagtctggtgggctggcctggccggtgtcggggtcataccaggacaggccgatgatctcggcccagggtgggggcgggcagacggctcgcagaagggtgtgggccaggaacgtgttgcgggccatgatgcctccaagggtgaaaagcagtcgagtagcgatgacggcggggtagccgtctgctgggctgaggccgaccgggcccatgtcctcgatgctcttgtgctgcggccataccccaaagctaccaaacagtctttttaatctcaaagatacaaacagtgcttgacatattatctgcagcgaaagatactttcatcatggtggctgatcatgattacgcgactcctgacgatgagtggatgacacctcctcaggtggcccgtgtgattccgaacaccactgctcaggctgtccggcgctgggctgaggagggtcagcttcctggggcgtttcgtactccttctgggcgttggcatattccgtggtcggctgtggtgggcatcatggggtttgatccgcgtgagtccgcatcaccgagtgatcgtcaccagagctgacagagtcgtcgatgagctttcgagtgcagagctgatggcacgacggtctggatacttgtggagatgagagacgactacatccagtcatggtcggggtacaccgaggggcagattcagcagtgctggcacgatgaggttgcccctgccattgactcgctcatggagcaggtaaggtctgttgccgagactcctgtgccgccgggttcgagattttacggcgatgagcagtgggccaagccttttcatccgtctactgcgatctgcggttcaatgggtccgccagcgatcacttgcacgcgctgaagctcctcgtctgggaagcgaacgtccaccatgtctatgcgccgtacacccttgctcgtgcatctattgaggcatcgtctactgctgtgtggctgttgagcacgaagacgcgcggagaacgtgtgctgcgagccttgcgatggtacgcgcaggattgtcacgactcgtgcaggttcatggatgatgagcagtatcgtgaccacctattgcggcgcattgaggggactgtcgctgcgggaaatctcgactcgcgcgctgctaggaaacggtaccgtgcaaccgatgttgtcgatgaggctgatcagctggttcccggaactctgagggcgtggcgagctttttctggtatggcccattcccgtatgtgggcatccagggggctgctcgacatggaagtgctgtccagtggccaaggaatggttacggcgaaggtgacgagcggatcggcccaaatcctttgggccgtcgtggcagctctgaatgttgctctcagtgccgctcgcttgtggcgtgattcgatgtgctcaccgtttgctgttgcccagtcggtagacgcgatgccagaggcgtttcgccgccctgtttagggtctgatcggggtagtgggtgttcacggggtcccaggttggccatggggcggcttggtgatgtgagttgggttgtgtggcagcctgggtgttgggtgtggcttcgttggccacgaaggcatgctcttccttgtgctgggacttgagtccccagtgctctcccctttgctagtggggggtggggtccccggaggtaggtcctccggggactttttctatgtctgtccgtgccccaggatttcgtatctaggcagtaccaattttgggttagttggaggtttctttggtaatggacagggtgagggtgatgaagaggtggccgtccttggtggcagaaattttctcgaacttcagctgaatgttgttatcagccactatctgttgggcggtgaggtgctcggagagcttctggaatccttcgcggatccacaggttgtaggggttggtgaccgagaccgaagggtatgggtcgaccttcagcgtcaggactggctggtctgggttgagggagttgatcttcaccagtttggggtaccggtcgcactcatgtgtctcttgtgttgggggccagcagtcgggggcccattcctcccagtggtcacgcatctcacgaagtactttcctgcatctcagcctctgcaggagctcgcgcgccaccgatgggagggctgccatgatgagggcaaggactgcgaacccgatgatgtaattgaccgtgtccctcgtcacgccgttcttgccgaggattccgatggcgaacgcgatgacgacaccgcccaggcacaggtgcatggggtcatgctgtgatggtttttcttcttcagcgactggtggggctatagtcatgtgtgccccttagtactaagtgatactggtgggttgcttttccccggtggccgtgtgcaagacggccaccggggttttccttcatgttcctgattttatctgcccggtgtggcgttttcatctttgtgtgggtggttcgcctggggtcttggagtgtggtgacgcggtgatggtcacggtgacggtgactgtggcgcgtggcgggtgaggtggttctttcctggtctggtgtgtggcccaggtgagtgtggtgatgagggccagggtgaggatgatgaccagggtggggagtagtttgtctggccggtgtcgccgggcttggtggcgcggcatgtttttccagggtgtgtctccgaacaggtcgtcgtcggaggggtcgtcgtggttcatagggtggccttggcgatggtggtgggcgagtttggtccaggtgatggtgccgtcggaggcgatgtggcggtcggcgggcagggtgtggacggtccatccggcgtcggtgagggcggtggtgaaggatttcttgatggatcgtttgggtaggtcgatgggggcgtgggtgccgacccagatgcaccggtttttgaggtgggtggcgccgaggtggttcatgtcgcggaccatgttttgggtgagtgtgagggtgtcggggtcccattggacggggatgatgatgtggtctgcgatggtgatggcgtgttgccaggcggcgtcgaggtcgttgtttccggtgtcgaggatgatgacgtggaagcggcttcttagggcggtgatgatgcggtcgaggtcgtcggcggtggggggtgtgatgaggctgttgtggttgtcggtgatggtgggtaggcatgtgatggtggcccagccttctggttgccaggagatgtaggggtcgaggtcgcggggttgggaggcgaatcctgggtgacgggctgcgcgggcgaggtcgatgacggtgttgtcggtgtggcggggtgcgcgggtggagagggtgccgcgtgggttgatttccacgacgacgatgtcgtcgtgtcctgctgtggtggcgagggcttgggcaaggatgacggccagcggggttttgccggtgccgcctttgaggttggcgagggtgatgatgtggtcggtgagttgggcgggtgcggcggtgtggtgagggttggcggtgaggttggcgatggtgaacagggcatcgagatcgtcggtggtgttctgctcggtgggttgggggtcgccggagatgatcgggtcggcgcggcgcggctgccatgccggcctcaccactgtcacgaccaccacgggtctgctggcgctgtgtgggtgtcgtcggcgatgactcacgatcggcagtctcaccatcgtctcggtgatgctcggctagcgctggacccggtcaagttcgggccggctcacccagtggtgatgactcggtcacagaaccgctgccggtcgttatctcggacgtctcgactcctccagtcctgatgggcgttggagccacctacacctactctcagaacgaccccgacctcgtgtggggcgggggcagatgtcacttgggccaatcgagagcccaggtgatggggaaagcaggggtgtgatatctgtcctggaaaactgggcagctgctaccgtggattgacggatctccacgaaagaagggaatgcgaccatgcagatcaccgtcaagaccatcaaagatcatcgggttcgcactgtccagaccgccatgagcagcgccttggggattggttcccaggtagacatgctcgcccccggcggttccaccagctcgagttccggttcatgctgctcgtgctcgacctgcgcggtagtggcgcagcctcaagactgaacggctggtcagccccaggggcgtggcgctcatcgcgtcacgccccttctattcgctggacagggtgcgcgagctgaggaacatcgcggtgtgtgcgatgacgaggggcaggagcaagtctgtgcgggttgccaagtagccctgcgcgatggccatcacgctggccccgacggcggcgaagacacctccgatacgtcgcttcatgccgccgaattgcatcaggacgaataggactcccgcggtccacatccctccgggcatgcatctgggaaagatgaaccggaagatgatctcttcacaggagagctggagtactagcagcgtagcccccacggggagactcacctctactgacagacggatcgtcttcatccacccacccgagctggcatcgaccatttcggtggccatgcgcgaccggtggcctcgtgcctctcgctgcgtgtcgatccagccgagcagtccgtggacgctctccgctaggactcctgacgcgacagtctcaccaattcctaagcccacggcgaggaccgcgacgcccccctgcacggcaggctgtgtgacttggtggtcccaccaacccgccggcaggaccatgcgtgcgaggctgcacacgagcaggaggtggagggtcacgacgagcgacatctggaataccgcttgccgttcggcgatggtggcgttgggaaagagcggtaggccggcacgggcagcggcgctcgacagcttccgcaagagcggtttggagacgaagtagtaggcgacgtacagcgccagcgctgtcgcgatgatgatcatcggtctgccaccgagctgacccgccgatagccgtttctgttccaccaatactggctgttgtagatcaggtggcccagaacacaggcccagatcccccagaagatgaacaggatagtccccaaggcggcgagcgggatcttggagaggacctgtccccgtccgaacaccgagtggccgcaagcaaacaagagtgctcccacagcggtgagcgcgagccaggccggggttgctcgcagactgatcaccgggaccccgacccggaagccgacctcttctcctacagcgatgactagcaactgccacagcggcatgttctgaacggagcgcgcgactcgggctcgagtcacccacacgggctgttgagcgctcacatcaccactcaggtaccccggtgaggcacttcgcttagtactggggcccgatgtgcgagcattcgtgatgtgtcgcaggatccggttgtcaagccaagaggccagcagggctccggcgacagtgacgggtagcccgatcagcacgaggccccagccatgcggtgccgagaggtttctggccggcgtgcacgcgaggcaggcaagtgccaacactgccagcactacgacgtagatggtcgcataattcgacttgcgggtgacgttgccgaccatcttggccaaagtcgctggggaccagctgatgagtgcgatggtggtcagcaggaagcaggaccagacagacatccggcgcactcaggggtatgggtgcggctgtgggttttggaaaccgccatatgcggcgtagcgggggtgtgcccgcatgggtgcgctgggcagtgacagggcgagcagcccaggcgcccagagcctgacacagtgcagtcccagcccctggatctctatggtggtgaaatcttcgatgtacaggggtgacacacaggtgatgctgttgaccacgctctttaccagttccgcccccgtgtgggtgtcgtcaggtggcaggtcttcggcttgggcaatggtgcccgcgtcgaatttcgccacaactgattgcgcggcctgatagttcctcgcgtagtaggagacgttcgagtcgaggtcaagcatgtcctccgtggacatactggacgcgtcggcctcggcgtcgaaagacgtccataccgcgagcatccgaaccccgctgcactcgagaaacgccttgtacatggctgcttccagacccgcgtctgcacctaggccgacggcgacgaggggaagttggttgccactaccgaccatcatgcatgccacggtgaaatgcttgagcccgggagtcggaagccagtagaaacgcagttcgtggcttcggcccgctgcacgttccacgagccgctggatgcgctggaggcggggtccttcgacgcggatgcgcacaggtgacgaggctccataccacaggcccatcgcggcatctacctggatcaattcataagccgcggacagcgttgcggcgacgcgtgaagtgtggacggcggtgccggtcgtcacggccgttcccagccacggctcaccgtcgtgccgacgggggttgtaacccaggtaaaagaactgcgccgggatccactcctgccgggaggtcccgacacggggagtcttgacccatgtcatgggcaagtcgtcgcgataggtgtcgaacgcacctccagccactcgttgcgcgaagccgaatgcgcccagatcgagaacttcgtcctcggtccgggcgaggagttcctgacgagtcgcccagcgccgttcgaagggactatggagaatcccggtacccgcgcagtagcgctcgacggcctccgcgtagaccttgatctctgcctcaaactcgttcagccccaccccaccgatgtggtagctacccggcttggggtcgggccggtcaagcagtgcgtgcatccccgtgagttccccaccgttcacccgcacgcgggggccgagcgcggggtgcagcgagtagccgacggaagtcaccagcccgcatagcgggctgtaggtgcgccgcctgagccgggctgcggtctcgacggggtcgctatcctggcgaagcttcatcgctcgccccctgccgccagccactcacggatgtcgtagtacaggtccggagcggtttcaacctgcgctggtgcatcaaaacgggacataggtaggacgtcgttgtaggcgatctccatcgtcggtatgtagaccgacaacactttgttgcgcgtcgtgttgaggccgttgcgggcgatgctgacagcctcatgcgcgacgtgcgcggccaagatcgcgcgcaccgacgctgccacggccggcgctccggcccttacgcggtcggcagcggccacccgcatccaggacaggtagctctgccgttcgcgcaggttcatcgcgacccgctgctcgaaggtccggtaggacgaggtcgcaccagggacgacgtagggacccacgtacaaggccggcccgtctacagctgcgtggagccacgacaggtgggcgcgtcgggcgaacaggtcaagggcgcgcagcatagccgggttgttctgcgccagcgctaccacaaggagtggctgcaggtccggcgccgaacccagcaacgccaacatctgggaggcctcctgctccatgtgcaactcgtcggccgactgctcaagccgcaggcctgcgaagagggtggctgatggctgcgtgtcgtcagcgaggacggtagcctgcagcccctctccctcgagaatctgctggatatcgccggcgaggagcgcgtcgtcgctgaatacccacaccgggcgcgtctctctacctccatccatcttgtcctcaacgttttcgaccagcgcaccgatcgatgctaggtgggccatcacgtcgtcaagggccgcgcgggtcaatccgggcacccgggacacgatctcgggcggctgcagtccttggctcaacaagtccaaggccggccacagggtcccggtggcgtcgtcgtcctccagcgttgtgctctcggcgttccagacgcctcgacggaactccaccctgtccatcgagtaaggcaccatcatgaggcccggtgaaatgtggttggtcactttggctcctgtacagcctaggcttggacgcccacggtcatggtgtgggtcgcggtttggaaaatcccgtcgaggttgagtgcctgattgagttcgtcctcgtagaagcttgaggactcgactgaggcaagaccgagccccgtgcagaccaagttgatctgttgtgcgatcgccccgacttcttgaagggcgaacctcaaacccctggctccgtacttccgcatcgccctccacggcgagatgacgaacaccaagtgcactccggccgcatccgattgctccacggccggctcgccggccatcgaattcctcacgccgcgacagccctcttcaccggtcacgggcaccagtcgatcgatgaccggcgagtagcggtagacgccgcgactcaagccggacacccgttgtgcggacatgaagatagacacgggatacagccctccaccagacgggacagcgcgtacattataccgcacgatatcaccgctcgaacgtgggacatccacgtgccccgtcacaccggcagcacctctcagaaacgcagctacgtcacgcaggtctagggattcgccggtgtagttccgtccgctgcgccggcgggcgatcacttgctcgaggggtgcgcgcaccctgctggacctgggaagttcgatcacatcggcagcgaacgtgtcgcgatccatctgtccgtacgtaacgatcatggggtcaacgaaatagtcgccgaccgagacgttgaactccatatccccccgggcgatgcgcgaggcgagcaagaagtctgcagctgcgttagacagccccggcccatcagtgttgtcgcagcggaactcgtgggtccgaaaccccacaccttccgtgcccgggctctgcgctcgatacgacgtgatcgcagaactagccttccttaaaccgcccggagtagctaccatgaccgtcccctctgaggtctcccgaacacttgcgacaatagcagcatgtgggggcagccgccagaggcgggcatccttgtctcgacaaccattgacctccggattcgatatgtgcataatcatagtcgtgccaacacgaaacgtgtacgtctcggaagacgacctagacctgttcgccgaagccaccgagatcgctggaggcctgtccgcagcggtgttggaggccttgcgcagctacgtagacaggcaccatcgcgcggccggcggattcgacgagatcgagctggagctgcagaacgacggtatcgaccaccgtgtcaccttcatgggtcgccgcctgatacacatccgccgtccagatcccgagggaacccgcatagacactgtctacttgaccgccaaacaccaattcgccgttgccaccaaaatccaacgacggctgccagactggacgaccggccacgagcacatctggtccgacccggagacctggaatcgggagttctggatcgcaggtgacaagacgatggccgtgtatcccagccttgacaaactccgcgaagctgaccccaatgtggccgaacgcgccgaggccgcggtcaaaatcccgccgttcgaggtcctggacatctgatgacagaatcatcatcttcccggcggcaattggcaatgccggtgctgtcagtcacggatctagccaagaaatacgtggttcatggcggctacgaggtcccggcactcaacggtgtctcgtttgacctgcacccgggagagatgctgggtttgttcgggccaaacggtgctggaaagacgacgctggtcaggatcatcgcgggcctcttatcggcagattctggagacgtccactggggatcggatcaaggtcgggccaggttaggctacgtgtcccaaaagggtggactgcagtacgggctcacgtgccgggaagagatggtcttccacgcacaatgcttcggccagtccgccaagcaggcccggactagcgtcgacgaggtcgccgcgatgctgcactgcgattacctgatggagtgggacgtcggaaggctctccggtgggcaacgccgaatcatcgaggtagggctagcactcgtcaatcaaccatcggtcgtcctgctcgacgagcccaccctgggcctggaccccgcaacacgcctgtcgttgtggcaaacggtaaagtcggcacgccgtgagaccggtgctgccttcctcgtcaccacccactacattgacgaggtggccgagcacctgtccaacgtcagcgtgatcaaccacggaaccgtcgtcgccaacggctcgccagcgcacatccgagaaatgttcgcgaccggggaagtaacgctcggcgtggccgaggatacggtggacagtgcggtggacgtgttggctgggaccgcgttcgaggcgcaccccaccgaaaccgtcccggggatcgtggtcaggtccaggcatcccgacgtggacgcggccaagatcatcaccatcctggctggtcatggcatctcggtggactccatatccgtacgcgaggcgaccttggaagaggcgtttctcacgatcacaggcagtcgagacccggagaggcaaatcccatgaacacttgcttcaggcgatatgcggcgatgtcgctgagagcgcggcgtgatttggccctgacattcatccagcccctcgtctacctagccctcttcggaccgctcttcgtcacgacgatgaagatgtcgcagagagctaccgccgctacgggttactccctatacatcacgggcctgtccatccaaatggccatgacgatcggtgccttcgcggggctaaccatcatcctcgaataccgactcggcatcctcgaacggatctggagcacccccctcacggggagcaagatgatggcggggcgaatcgcgcgcgacgtcgttatgatgatgatgccgatactggtcgtcttcatcatcggcctggtgctgggaacacgccccagcccactgggcctggcgacctacttcgtgacagtgctcggcacaggagccacgttcgccggggtctcctacgcggtggcactcagaacgaagagcgaggcagcgctatccgcgatcttcaacctcatcctgctacccatcctcctgctgtcggggatcatgctgcccatgtcgttcgcaccacactggatcgccaccgctgcccacgtgaacccgttgtggtacctggtgcaaggcgcgcggaaccagttcagcgttctagggctcgtggcggcggccccatggagttgggctgtggccatcgtcatgtcagccgctgccttcggctgggcaagccacgaattcaacaagaggcgctgacacaaagaatggtgccgggaacccaggtccccggcaccaccgagtgcactcgcgacgtcaacgcaccgttgcggtcactgcgcaggtcgagcacgaggacgacgagcccgcgctgctgcaggtcgagccgccaggcgcgagcaggtcgacgttagcgtcggcgccgccgaagacggacgtgacggccggctgagaggtgcggatgcggtgctccagcgaggaggtggtggtgagtttcatgggaggtgctcctaggagtgagacgagaacaaaccctagcgataggttagcagtccgcaaccgactccgggaatagtagaagcgcgcatccgtagcggaagaccttagcctgattacagtgaccctgttcgcgtctcaacattattccacacccccgagcagcgaacgacaccgcgatgatgatccgtcgcctctccaccgaagaactccgcgcccacatcgcaccgggccgccgtcccgtgcatcagacctgccgtcaacgtcggccatgaagctgggaaggtggctctcgtctaggagcagacgcgggacgcctcctccaggttgggccggggaagtgtccggttcttgatgtaggtggcggtccctattgatgggcgttgaccgtgggaatgcggtcggcgaagggggtggcgaacccgttgagcgcaggcttccagcgcatgcatcaacgctgtctgccggccaccggcaagcctcacccgcccgtcatggccatcatcgaggtgccggtgaatcctcgacacatgatcccaactcccccggaggggcttccggggctgttcagccaccagatcagccaggcggcgagcccgactctgccacccggaccctgcagagcgtgcctgctgccgtcgtgtcgtgtcgggccagtgggccaccagatcggccacatccgtcttggcccatctccagcccgccagacccagggaggccatcacctcatcgacgccgcgccgggtggtctcatcaaccccgtcaaacagctcgggccacctcgatgatgccgtccgtgaacgatccagattcatgacatgctcctcttcacagatgccgacgacgatcaggccgtggccgtggcaacggggtgacctgccggcgcggctcacgacgttgagccggaaccacacgagacgcaccagtgtgctgcgccgtcttgagtcgggcgctgtactgggccctggcgctgtggtgaacagcccgacgaagcaccgaccgccggctgtcctcatcgccagggcgaggcatggggcgcggcatggtgcgcccggtagcagcatccatgagggtgatccggtcagccaaaatgccgagccggttttcccacttccggggccacggcaccagcaggtcacgctgacagcccacgccgtggcgtcggcagtccacaacattttctcacggccaggatgcgagtgcagcagctccaccggaacaccagcatcacgcacccgccgcatc

SEQ ID NO: 108 - DNA, 582 bp, Propionibacterium acnes
  source 1..582: mol_type = genomic DNA
accagatcggccacatccgtcttggcccatctccagcccgccagacccagggaggccatcacctcatcgacgccgcgccgggtggtctcatcaaccccgtcaaacagctcgggccacctcgatgatgccgtccgtgaacgatccagattcatgacatgctcctcttcacagatgccgacgacgatcaggccgtggccgtggcaacggggtgacctgccggcgcggctcacgacgttgagccggaaccacacgagacgcaccagtgtgctgcgccgtcttgagtcgggcgctgtactgggccctggcgctgtggtgaacagcccgacgaagcaccgaccgccggctgtcctcatcgccagggcgaggcatggggcgcggcatggtgcgcccggtagcagcatccatgagggtgatccggtcagccaaaatgccgagccggttttcccacttccggggccacggcaccagcaggtcacgctgacagcccacgccgtggcgtcggcagtccacaacattttctcacggccaggatgcgagtgcagcagctccaccggaacaccagcatcacgcacccgccgcatc

SEQ ID NO: 109 - DNA, 16496 bp, Propionibacterium acnes
  source 1..16496: mol_type = genomic DNA
gtgttccagtgcctcgcgggcgtgatgttcttcttcggcaccttcttgccacatgcttcgcgcttcagcctcgccatccaagcgaacctggactgtgaacgagtcctcatcgggtccgtcctcattccacgcggcaatgatcccacgggcctcgtctgcgacctgactcaacttcatcgcctgcccgacagccccgagagccggaatctcgaacacccagatattcgcctcagccgagacctcacgatgggcgatcacttcgtaggtcgtctcaccttctactgtcgtgtccattacttccactccttcggaattttcacgcctgctcgctccagctgtgccaggacaccaactgacgtcagctggtgtcctgctggtatcgatacgcgcccggctccgccggggcgtccccagatttcatggcttcccttggcgttccgcagacgggcccatccttgagaacggagcagcttgaggacgtccttagttttctgcggtttcacacatcatagtatagccccacttaacttgtaaactaagcccctgtttacattttagttggtgcatgtgatccctgctcttatgacgtcgcccgacctggcgccttagacatgcactgttcatcctcaaccacactcaccgtcacgggtccgaaggcgaggtctatcaccattcgcatcgatgaagttgaagcaggatcgtccgcatcacgcactgccgatccggacagacgccaccggccgtaccgactgtttacgatctgccaccgcagactgctgccataaccgctatcacctctgatagtacgtttagtactatcagaggtgattcaagattctcctgtcgagcagccctacagtcacgaagtcctgcgatcgtcatcgcttaaggcagacggatggccatcggggaccactcgcaaagcaggggcgatcagcaacagtgatgtgccatgagcaagtactggtgcaccggctgtttactccgcccctagataaaccacgggtgcaggggtggacaccacaccatgaccgatgtggtgcccaccccatggctcacaggcaggccctatcgccgggagcactgctgcagatgaggctcagtaacctgccatgtctcacctggggccaaggtgccaagctccccacggaatctcaggcatcggaaaccagcagccgaacttccacagcatgagcgccctacgaaaaagcaggccgccgacggttctcaagaactcgccggcggcctgcatcgccactcgaactgtaaccgtggtccgaccccgtgcacaggtaagctccacactcccaccaggcatggccgaggcagtaccaagttgccgtggcccatcggcagatttggttaaattttgaaaagtcatatagactccttctgtaaatttttaaatctcataggactctcgccatcgccagccagcttcgacaggagtcccgatgtttcaccgagtgaaatatcggcaccgtttgagttgacctaaagctcaaaagatgctagaatccatcttacctcgttaggggcgttttgtcaaacgcccctatattgcgtgtcttcgcgcgtcgtagcgctgatgctgcgcctgtgtcgactatccgtttgtaagtactttcgatgacaccagcagtggctactcatgactggtgcgtgcgggtctaaagcagcagggaaaggaatcgcagtagaagccgcttgattcctatcacccctgatggtactatcagtactaacagagcagggcttactcgatgcgtgagaatcggggacatgctgagcctctcgtaggtcattggcctgctgggcgtcagtgtggcgcggttcgatccagtgaactctatcagctctgttagtactgtcagagttgatatattcgaccccaggaggagcccatgagttacatcgttcgcaccggaaatttggtcgacacccccgagctgcgtgagggagagcatggcccgtacacctacgctcgcgtcatcgtgtccgatcgcattcgccaggaggacggcagctacgtcaacgggccagcgatcgcctacgacgtcttggcgggtggcagccaagccgtgaatctggttgaagccgccaaggcgagcggcaacatccgcatcatgttcgcgggccgttaccgcgtcaccgagtggcggggtgagcagggcactcgtatccagcatgaggtccgagccgacgaagtgagcgtgagcctgctcggtcagagggtgaccgtggagcggcctcgaggtgacgtggcatccaaggagagcacgtcgttctgattgagtccgggggcacggtggtcgccgtggtaaaccgtgcccctgacagtactattgacactattggaggtatcagtgtgactgctcaaattttcgccttgtgcaaccagaagggtggcgtcggaaagtcgacatcgacgtttcatctggcccgtgccgcggtgttgcgtggccagcgtgtgcttgtcgtcgacaacgacccccagggcaacctgacgtctgtcgcggccgccgagcccgtgggggaggatcaggcggggctggccgatgtgctcagcgcgcgtgctccagagaccctccgcgatgtgatcgtgccgggaatctggtctggcctcgatgtcgtgccgacgtctggcatcacgctcggctgggtgcgtgacgaactcgtgatcgccggtgccggccgagaaggccggctgcgggaggccctggccggcgtcgaggacgactacgacgtgatcctgatcgactgtgctccatcgctcgatcagctcacgatcaacggcctggtggccgcccagggtgtcatcgtcgtgacgcactcgaagttgtggagcgccaacggcctcgccccgctgctcgacaccatcgacagcgtgcgcagctactacaacggcgcgctgcgcgtggcgggcatcatcgtcaaccagcacgaggagaacaccatcagcgggaaaacctggctcgacgagctgcatcaggctgccgagtcccggaagctgaccgtgcttgacccgccgatccccaagcgtgtcgtcatcgccgataccgtcgaggccgcgcgcggtctcgacgagtggggaagtgccgaggcggccgcgctcggccagttgtacgcccaccacctgacctgcatcgaaggagccctgtgatgacccgtccagccccccgaaagtcctcattgagcggatcaactccggtcgccccgccggctcagacggcgccggcaccgtctgccgcacctaccccccacaaggccgatgagtcacagacgagcagcaccacgaggaagtggcggcacaaggtgtcgttctaccaggacccggccgacaccgaccgggtgcgcggggcgatcctttacacgatgacgaccgagggcaaccggaacctgagccagttcgtcaacgatgccgtcatggccaaggtggtcgagctggaagtcaagtacaacgatggccagccattccccgctgtgggagcccgaggactaccccagggcggtgcagccgccgccggtgagtagaggaccatcgaccgtcgggggcttcaccatgcccccgaccctcggtcatcctgatcctcttgtcgatggtggtgacagtgggggattcacgcctcgttcagatcagaggaagtctcaccgcgtgattagtactatcaaatctgacagtactaacagagcagatagggttccctaggtcgagctgtatcacgccgacaaccagtgagccagtgatctacgaggggcgcaatatgcacccgatcggtagccgcgaaggcctcgccctgccccgatagtactatcaccactatcaatggtgctagtggtgagtttcttccattgatgacaacagcacagtgctgccgtctgtgtgcgggccaccagcccgcacacagttgccgtcgaggacgttgttcatgctctgtggtggccggtcctgagggcggctcgcaggatctcccggcgctcacggcgacgagcctggtagccaaggtctgcatgttcggcggcgagacgggctttgagggttgcggcttctgcacggcggtggagttggtcgtcgatgagttgggcgcgggccagacgccgcttatgggggttgtcgtgggtgaggggggcgtcgaggctgccgtcgtgggttagggccagggctgctcgttcggcgtcgtcgaggccgatgtggtggacggtcacgggtgcggtggtgacgtcgaggatgtccaggtggatgttgtggccgccgccgggggcttcggggaagtctggtgggctggcctggccggtgtcggggtcataccaggacaggccgatgatctcggcccagggtgggggcgggcagacggctcgcagaagggtgtgggccaggaacgtgttgcgggccatgatgcctccaagggtgaaaagcagtcgagtagcgatgacggcggggtagccgtctgctgggctgaggccgaccgggcccatgtcctcgatgctcttgtgctgcggccataccccaaagctaccaaacagtctttttaatctcaaagatacaaacagtgcttgacatattatctgcagcgaaagatactttcatcatggtggctgatcatgattacgcgactcctgacgatgagtggatgacacctcctcaggtggcccgtgtgattccgaacaccactgctcaggctgtccggcgctgggctgaggagggtcagcttcctggggcgtttcgtactccttctgggcgttggcatattccgtggtcggctgtggtgggcatcatggggtttgatccgcgtgagtccgcatcaccgagtgatcgtcaccagagctgacagagtcgtcgatgagctttcgagtgcagagctgatggcacgacggtctggatacttgtggagatgagagacgaccacatccagtcatggtcggggtacaccgaggggcagattcagcagtgctggcacgatgaggttgcccctgccattgactcgctcatggagcaggtaaggtctgttgccgagactcctgtgccgccgggttcgagattttacggcgatgagcagtgggccaagccttttcatccgtctactgcgatctgcggttcaatgggtccgccagcgatcacttgcacgcgctgaagctcctcgtctgggaagcgaacgtccaccatgtctatgcgccgtacacccttgctcgtgcatctattgaggcatcgtctactgctgtgtggctgttgagcacgaagacgcgcggagaacgtgtgctgcgagccttgcgatggtacgcgcaggattgtcacgactcgtgcaggttcatggatgatgagcagtatcgtgaccacctattgcggcgcattgaggggactgtcgctgcgggaaatctcgactcgcgcgctgctaggaaacggtaccgtgcaaccgatgttgtcgatgaggctgatcagctggttcccggaactctgagggcgtggcgagctttttctggtatggcccattcccgtatgtgggcatccagggggctgctcgacatggaagtgctgtccagtggccaaggaatggttacggcgaaggtgacgagcggatcggcccaaatcctttgggccgtcgtggcagctctgaatgttgctctcagtgccgctcgcttgtggcgtgattcgatgtgctcaccgtttgctgttgcccagtcggtagacgcgatgccagaggcgtttcgccgccctgtttagggtctgatcggggtagtgggtgttcacggggtcccaggttggccatggggcggcttggtgatgtgagttgggttgtgtggcagcctgggtgttgggtgtggcttcgttggccacgaaggcatgctcttccttgtgctgggacttgagtccccagtgctctcccctttgctagtggggggtggggtccccggaggtaggtcctccggggactttttctatgtctgtccgtgccccaggatttcgtatctaggcagtaccaattttgggttagttggaggtttctttggtaatggacagggtgagggtgatgaagaggtggccgtccttggtggcagaaattttctcgaacttcagctgaatgttgttatcagccactatctgttgggcggtgaggtgctcggagagcttctggaatccttcgcggatccacaggttgtaggggttggtgaccgagaccgaagggtatgggtcgaccttcagcgtcaggactggctggtctgggttgagggagttgatcttcaccagtttggggtaccggtcgcactcatgtgtctcttgtgttgggggccagcagtcgggggcccattcctcccagtggtcacgcatctcacgaagtactttcctgcatctcagcctctgcaggagctcgcgcgccaccgatgggagggctgccatgatgagggcaaggactgcgaacccgatgatgtaattgaccgtgtccctcgtcacgccgttcttgccgaggattccgatggcgaacgcgatgacgacaccgcccaggcacaggtgcatggggtcatgctgtgatggtttttcttcttcagcgactggtggggctatagtcatgtgtgccccttagtactaagtgatactggtgggttgcttttccccggtggccgtgtgcaagacggccaccggggttttccttcatgttcctgattttatctgcccggtgtggcgttttcatctttgtgtgggtggttcgcctggggtcttggagtgtggtgacgcggtgatggtcacggtgacggtgactgtggcgcgtggcgggtgaggtggttctttcctggtctggtgtgtggcccaggtgagtgtggtgatgagggccagggtgaggatgatgaccagggtggggagtagtttgtctggccggtgtcgccgggcttggtggcgcggcatgtttttccagggtgtgtctccgaacaggtcgtcgtcggaggggtcgtcgtggttcatagggtggccttggcgatggtggtgggcgagtttggtccaggtgatggtgccgtcggaggcgatgtggcggtcggcgggcagggtgtggacggtccatccggcgtcggtgagggcggtggtgaaggatttcttgatggatcgtttgggtaggtcgatgggggcgtgggtgccgacccagatgcaccggtttttgaggtgggtggcgccgaggtggttcatgtcgcggaccatgttttgggtgagtgtgagggtgtcggggtcccattggacggggatgatgatgtggtctgcgatggtgatggcgtgttgccaggcggcgtcgaggtcgttgtttccggtgtcgaggatgatgacgtggaagcggcttcttagggcggtgatgatgcggtcgaggtcgtcggcggtggggggtgtgatgaggctgttgtggttgtcggtgatggtgggtaggcatgtgatggtggcccagccttctggttgccaggagatgtaggggccgaggtcgcggggttgggaggcgaatcctgggtgacgggctgcgcgggcgaggtcgatgacggtgttgtcggtgtggcggggtgcgcgggtggagagggtgccgcgtgggttgatttccacgacgacgatgtcgtcgtgtcctgctgtggtggcgagggcttgggcaaggatgacggccagcggggttttgccggtgccgcctttgaggttggcgagggtgatgatgtggtcggtgagttgggcgggtgcggcggtgtggtgagggttggcggtgaggttggcgatggtgaacagggcatcgagatcgtcggtggtgttctgctcggtgggttgggggtcgccggagatgatcgggtcggcgcggcgcggctgccatgccggcctcaccactgtcacgaccaccacgggtctgctggcgctgtgtgggtgtcgtcggcgatgactcacgatcggcagtctcaccatcgtctcggtgatgctcggctagcgctggacccggtcaagttcgggccggctcacccagtggtgatgactcggtcacagaaccgctgccggtcgttatctcggacgtctcgactcctccagtcctgatgggcgttggagccacctacacctactctcagaacgaccccgacctcgtgtggggcgggggcagatgtcacttgggccaatcgagagcccaggtgatggggaaagcaggggtgtgatatctgtcctggaaaactgggcagctgctaccgtggattgacggatctccacgaaagaagggaatgcgaccatgcagatcaccgtcaagaccatcaaagatcatcgggttcgcactgtccagaccgccatgagcagcgccttggggattggttcccaggtagacatgctcgcccccggcggttccaccagctcgagttccggttcatgctgctcgtgctcgacctgcgcggtagtggcgcagcctcaagactgaacggctggtcagccccaggggcgtggcgctcatcgcgtcacgccccttctattcgctggacagggtgcgcgagctgaggaacatcgcggtgtgtgcgatgacgaggggcaggagcaagtctgtgcgggttgccaagtagccctgcgcgatggccatcacgctggccccgacggcggcgaagacacctccgatacgtcgcttcatgccgccgaattgcatcaggacgaataggactcccgcggtccacatccctccgggcatgcatctgggaaagatgaaccggaagatgatctcttcacaggagagctggagtactagcagcgtagcccccacggggagactcacctctactgacagacggatcgtcttcatccacccacccgagctggcatcgaccatttcggtggccatgcgcgaccggtggcctcgtgcctctcgctgcgtgtcgatccagccgagcagtccgtggacgctctccgctaggactcctgacgcgacagtctcaccaattcctaagcccacggcgaggaccgcgacgcccccctgcacggcaggctgtgtgacttggtggtcccaccaacccgccggcaggaccatgcgtgcgaggctgcacacgagcaggaggtggagggtcacgacgagcgacatctggaataccgcttgccgttcggcgatggtggcgttgggaaagagcggtaggccggcacgggcagcggcgctcgacagcttccgcaagagcggtttggagacgaagtagtaggcgacgtacagcgccagcgctgtcgcgatgatgatcatcggtctgccaccgagctgacccgccgatagccgtttctgttccaccaatactggctgttgtagatcaggtggcccagaacacaggcccagatcccccagaagatgaacaggatagtccccaaggcggcgagcgggatcttggagaggacctgtccccgtccgaacaccgagtggccgcaagcaaacaagagtgctcccacagcggtgagcgcgagccaggccggggttgctcgcagactgatcaccgggaccccgacccggaagccgacctcttctcctacagcgatgactagcaactgccacagcggcatgttctgaacggagcgcgcgactcgggctcgagtcacccacacgggctgttgagcgctcacatcaccactcaggtaccccggtgaggcacttcgcttagtactggggcccgatgtgcgagcattcgtgatgtgtcgcaggatccggttgtcaagccaagaggccagcagggctccggcgacagtgacgggtagcccgatcagcacgaggccccagccatgcggtgccgagaggtttctggccggcgtgcacgcgaggcaggcaaatgccatcactgccagcactacgacgtagatggtcgcataattcgacttgcgggtgacgttgccgaccatcttggccaaagtcgctggggaccagctgatgagtgcgatggtggtcagcaggaagcaggaccagacagacatccggcgcactcaggggtatgggtgcggctgtgggttttggaaaccgccatatgcggcgtagcgggggtgtgcccgcatgggtgcgctgggcagtgacagggcgagcagcccaggcgcccagagcctgacacagtgcagtcccagcccctggatctctatggtggtgaaatcttcgatgtacaggggtgacacacaggtgatgctgttgaccacgctctttaccagttccgcccccgtgtgggtgtcgtcaggtggcaggtcttcggcttgggcaatggtgcccgcgtcgaatttcgccacaactgattgcgcggcctgatagttcctcgcgtagtaggagacgttcgagtcgaggtcaagcatgtcctccgtggacatactggacgcgtcggcctcggcgtcgaaagacgtccataccgcgagcatccgaaccccgctgcactcgagaaacgccttgtacatggctgcttccagacccgcgtctgcacctaggccgacggcgacgaggggaagttggttgccactaccgaccatcatgcatgccacggtgaaatgcttgagcccgggagtcggaagccagtagaaacgcagttcgtggcttcggcccgctgcacgttccacgagccgctggatgcgctggaggcggggtccttcgacgcggatgcgcacaggtgacgaggctccataccacaggcccatcgcggcatctacctggatcaattcataagccgcggacagcgttgcggcgacgcgtgaagtgtggacggcggtgccggtcgtcacggccgttcccagccacggctcaccgtcgtgccgacgggggttgtaacccaggtaaaagaactgcgccgggatccactcctgccgggaggtcccgacacggggagtcttgacccatgtcatgggcaagtcgtcgcgataggtgtcgaacgcacctccagccactcgttgcgcgaagccgaatgcgcccagatcgagaacttcgtcctcggtccgggcgaggagttcctgacgagtcgcccagcgccgttcgaagggactatggagaatcccggtacccgcgcagtagcgctcgacggcctccgcgtagaccttgatctctgcctcaaactcgttcagccccaccccaccgatgtggtagctacccggcttggggtcgggccggtcaagcagtgcgtgcatccccgtgagttccccaccgttcacccgcacgcgggggccgagcgcggggtgcagcgagtagccgacggaagtcaccagcccgcatagcgggctgtaggtgcgccgcctgagccgggctgcggtctcgacggggtcgctatcctggcgaagcttcatcgctcgccccctgccgccagccactcacggatgtcgtagtacaggtccggagcggtttcaacctgcgctggtgcatcaaaacgggacataggtaggacgtcgttgtaggcgatctccatcgtcggtatgtagaccgacaacactttgttgcgcgtcgtgttgaggccgttgcgggcgatgctgacagcctcatgcgcgacgtgcgcggccaagatcgcgcgcaccgacgctgccacggccggcgctccggcccttacgcggtcggcagcggccacccgcatccaggacaggtagctctgccgttcgcgcaggttcatcgcgacccgctgctcgaaggtccggtaggacgaggtcgcaccagggacgacgtagggacccacgtacaaggccggcccgtctacagctgcgtggagccacgacaggtgggcgcgtcgggcgaacaggtcaagggcgcgcagcatagccgggttgttctgcgccagcgctaccacaaggagtggctgcaggtccggcgccgaacccagcaacgccaacatctgggaggcctcctgctccatgtgcaactcgtcggccgactgctcaagccgcaggcctgcgaagagggtggctgatggctgcgtgtcgtcagcgaggacggtagcctgcagcccctctccctcgagaatctgctggatatcgccggcgaggagcgcgtcgtcgctgaatacccacaccgggcgcgtctctctacctccatccatcttgtcctcaacgttttcgaccagcgcaccgatcgatgctaggtgggccatcacgtcgtcaagggccgcgcgggtcaatccgggcacccgggacacgatctcgggcggctgcagtccttggctcaacaagtccaaggccggccacagggtcccggtggcgtcgtcgtcctccagcgttgtgctctcggcgttccagacgcctcgacggaactccaccctgtccatcgagtaaggcaccatcatgaggcccggtgaaatgtggttggtcactttggctcctgtacagcctaggcttggacgcccacggtcatggtgtgggtcgcggtttggaaaatcccgtcgaggttgagtgcctgattgagttcgtcctcgtagaagcttgaggactcgactgaggcaagaccgagccccgtgcagaccaagttgatctgttgtgcgatcgccccgacttcttgaagggcgaacctcaaacccctggctccgtacttccgcatcgccctccacggcgagatgacgaacaccaagtgcactccggccgcatccgattgctccacggccggctcgccggccatcgaattcctcacgccgcgacagccctcttcaccggtcacgggcaccagtcgatcgatgaccggcgagtagcggtagacgccgcgactcaagccggacacccgttgtgcggacatgaagatagacacgggatacagccctccaccagacgggacagcgcgtacattataccgcacgatatcaccgctcgaacgtgggacatccacgtgccccgtcacaccggcagcacctctcagaaacgcagctacgtcacgcaggtctagggattcgccggtgtagttccgtccgctgcgccggcgggcgatcacttgctcgaggggtgcgcgcaccctgctggacctgggaagttcgatcacatcggcagcgaacgtgtcgcgatccatctgtccgtacgtaacgatcatggggtcaacgaaatagtcgccgaccgagacgttgaactccatatccccccgggcgatgcgcgaggcgagcaagaagtctgcagctgcgttagacagccccggcccatcagtgttgtcgcagcggaactcgtgggtccgaaaccccacaccttccgtgcccgggctctgcgctcgatacgacgtgatcgcagaactagccttccttaaaccgcccggagtagctaccatgaccgtcccctctgaggtctcccgaacacttgcgacaatagcagcatgtgggggcagccgccagaggcgggcatccttgtctcgacaaccattgacctccggattcgatatgtgcataatcatagtcgtgccaacacgaaacgtgtacgtctcggaagacgacctagacctgttcgccgaagccaccgagatcgctggaggcctgtccgcagcggtgttggaggccttgcgcagctacgtagacaggcaccatcgcgcggccggcggattcgacgagatcgagctggagctgcagaacgacggtatcgaccaccgtgtcaccttcatgggtcgccgcctgatacacatccgccgtccagatcccgagggaacccgcatagacactgtctacttgaccgccaaacaccaattcgccgttgccaccaaaatccaacgacggctgccagactggacggccggccacgagcacatctggtccgacccggagacctggaatcgggagttctggatcgcaggtgacaagacgatggccgtgtatcccagccttgacaaactccgcgaagctgaccccaatgtggccgaacgcgccgaggccgcggtcaaaatcccgccgttcgaggtcctggacatctgatgacagaatcatcatcttcccggcggcaattggcaatgccggtgctgtcagtcacggatctagccaagaaatacgtggttcatggcggctacgaggtcccggcactcaacggtgtctcgtttgacctgcacccgggagagatgctgggtttgttcgggccaaacggtgctggaaagacgacgctggtcaggatcatcgcgggcctcttatcggcagattctggagacgtccactggggatcggatcaaggtcgggccaggttaggctacgtgtcccaaaagggtggactgcagtacgggctcacgtgccgggaagagatggtcttccacgcacaatgcttcggccagtccgccaagcaggcccggactagcgtcgacgaggtcgccgcgatgctgcactgcgattacctgatggagtgggacgtcggaaggctctccggtgggcaacgccgaatcatcgaggtagggctagcactcgtcaatcaaccatcggtcgtcctgctcgacgagcccaccctgggcctggaccccgcaacacgcctgtcgttgtggcaaacggtaaagtcggcacgccgtgagaccggtgctgccttcctcgtcaccacccactacattgacgaggtggccgagcacctgtccaacgtcagcgtgatcaaccacggaaccgtcgtcgccaacggctcgccagcgcacatccgagaaatgttcgcgaccggggaagtaacgctcggcgtggccgaggatacggtggacagtgcggtggacgtgttggctgggaccgcgttcgaggcgcaccccaccgaaaccgtcccggggatcgtggtcaggtccaggcatcccgacgtggacgcggccaagatcatcaccatcctggctggtcatggcatctcggtggactccatatccgtacgcgaggcgaccttggaagaggcgtttctcacgatcacaggcagtcgagacccggagaggcaaatcccatgaacacttgcttcaggcgatatgcggcgatgtcgctgagagcgcggcgtgatttggccctgacattcatccagcccctcgtctacctagccctcttcggaccgctcttcgtcacgacgatgaagatgtcgcagagagctaccgccgctacgggttactccctatacatcacgggcctgtccatccaaatggccatgacgatcggtgccttcgcggggctaaccatcatcctcgaataccgactcggcatcctcgaacggatctggagcacccccctcacggggagcaagatgatggcggggcgaatcgcgcgcgacgtcgttatgatgatgatgccgatactggtcgtcttcatcatcggcctggtgctgggaacacgccccagcccactgggcctggcgacctacttcgtgacagtgctcggcacaggagccacgttcgccggggtctcctacgcggtggcactcagaacgaagagcgaggcagcgctatccgcgatcttcaacctcatcctgctacccatcctcctgctgtcggggatcatgctgcccatgtcgttcgcaccacactggatcgccaccgctgcccacgtgaacccgttgtggtacctggtgcaaggcgcgcggaaccagttcagcgttctagggctcgtggcggcggccccatggagttgggctgtggccatcgtcatgtcagccgctgccttcggctgggcaagccacgaattcaacaagaggcgctgacacaaagaatggtgccgggaacccaggtccccggcaccaccgagtgcactcgcgacgtcaacgcaccgttgcggtcactgcgcaggtcgagcacgaggacgacgagcccgcgctgctgcaggtcgagccgccaggcgcgagcaggtcgacgttagcgtcggcgccgccgaagacggacgtgacggccggctgagaggtgcggatgcggtgctccagcgaggaggtggtggtgagtttcatgggaggtgctcctaggagtgagacgagaacaaaccctagcgataggttagcagtccgcaaccgactccgggaatagtagaagcgcgcatccgtagcggaagaccttagcctgattacagtgaccctgttcgcgtctcaacattattccacacccccgagcagcgaacgacaccgcgatgatgatccgtcgcctctccaccgaagaactccgcgcccacatcgcaccgggccgccgtcccgtgcatcagacctgccgtcaacgtcggccatgaagctgggaaggtggctctcgtctaggagcagacgcgggacgcctcctccaggttgggccggggaagtgtccggttcttgatgtaggtggcggtccctattgatgggcgttgaccgtgggaatgcggtcggcgaagggggtggcgaacccgttgagcgcaggcttccagcgcatgcatcaacgctgtctgccggccaccggcaagcctcacccgcccgtcatggccatcatcgaggtgccggtgaatcctcgacacatgatcccaactcccccggaggggcttccggggctgttcagccaccagatcagccaggcggcgagcccgactctgccacccggaccctgcagagcgtgcctgctgccgtcgtgtcgtgtcgggccagtgggccaccagatcggccacatccgtcttggcccatctcc

SEQ ID NO: 110 - DNA, 16494 bp, Propionibacterium acnes
  source 1..16494: mol_type = genomic DNA
gtgttccagtgcctcgcgggcgtgatgttcttcttcggcaccttcttgccacatgcttcgcgcttcagcctcgccatccaagcgaacctggactgtgaacgagtcctcatcgggtccgtcctcattccacgcggcaatgatcccacgggcctcgtctgcgacctgactcaacttcatcgcctgcccgacagccccgagagccggaatctcgaacacccagatattcgcctcagccgagacctcacgatgggcgatcacttcgtaggtcgtctcaccttctactgtcgtgtccattacttccactccttcggaattttcacgcctgctcgctccagctgtgccaggacaccaactgacgtcagctggtgtcctgctggtatcgatacgcgcccggctccgccggggcgtccccagatttcatggcttcccttggcgttccgcagacgggcccatccttgagaacggagcagcttgaggacgtccttagttttctgcggtttcacacatcatagtatagccccacttaacttgtaaactaagcccctgtttacattttagttggtgcatgtgatccctgctcttatgacgtcgcccgacctggcgccttagacatgcactgttcatcctcaaccacactcaccgtcacgggtccgaaggcgaggtctatcaccattcgcatcgatgaagttgaagcaggatcgtccgcatcacgcactgccgatccggacagacgccaccggccgtaccgactgtttacgatctgccaccgcagactgctgccataaccgctatcacctctgatagtacgtttagtactatcagaggtgattcaagattctcctgtcgagcagccctacagtcacgaagtcctgcgatcgtcatcgcttaaggcagacggatggccatcggggaccactcgcaaagcaggggcgatcagcaacagtgatgtgccatgagcaagtactggtgcaccggctgtttactccgcccctagataaaccacgggtgcaggggtggacaccacaccatgaccgatgtggtgcccaccccatggctcacaggcaggccctatcgccgggagcactgctgcagatgaggctcagtaacctgccatgtctcacctggggccaaggtgccaagctccccacggaatctcaggcatcggaaaccagcagccgaacttccacagcatgagcgccctacgaaaaagcaggccgccgacggttctcaagaactcgccggcggcctgcatcgccactcgaactgtaaccgtggtccgaccccgtgcacaggtaagctccacactcccaccaggcatggccgaggcagtaccaagttgccgtggcccatcggcagatttggttaaattttgaaaagtcatatagactccttctgtaaatttttaaatctcataggactctcgccatcgccagccagcttcgacaggagtcccgatgtttcaccgagtgaaatatcggcaccgtttgagttgacctaaagctcaaaagatgctagaatccatcttacctcgttaggggcgttttgtcaaacgcccctatattgcgtgtcttcgcgcgtcgtagcgctgatgctgcgcctgtgtcgactatccgtttgtaagtactttcgatgacaccagcagtggctactcatgactggtgcgtgcgggtctaaagcagcagggaaaggaatcgcagtagaagccgcttgattcctatcacccctgatggtactatcagtactaacagagcagggcttactcgatgcgtgagaatcggggacatgctgagcctctcgtaggtcattggcctgctgggcgtcagtgtggcgcggttcgatccagtgaactctatcagctctgttagtactgtcagagttgatatattcgaccccaggaggagcccatgagttacatcgttcgcaccggaaatttggtcgacacccccgagctgcgtgagggagagcatggcccgtacacctacgctcgcgtcatcgtgtccgatcgcattcgccaggaggacggcagctacgtcaacgggccagcgatcgcctacgacgtcttggcgggtggcagccaagccgtgaatctggttgaagccgccaaggcgagcggcaacatccgcatcatgttcgcgggccgttaccgcgtcaccgagtggcggggtgagcagggcactcgtatccagcatgaggtccgagccgacgaagtgagcgtgagcctgctcggtcagagggtgaccgtggagcggcctcgaggtgacgtggcatccaaggagagcacgtcgttctgattgagtccgggggcacggtggtcgccgtggtaaaccgtgcccctgacagtactattgacactattggaggtatcagtgtgactgctcaaattttcgccttgtgcaaccagaagggtggcgtcggaaagtcgacatcgacgtttcatctggcccgtgccgcggtgttgcgtggccagcgtgtgcttgtcgtcgacaacgacccccagggcaacctgacgtctgtcgcggccgccgagcccgtgggggaggatcaggcggggctggccgatgtgctcagcgcgcgtgctccagagaccctccgcgatgtgatcgtgccgggaatctggtctggcctcgatgtcgtgccgacgtctggcatcacgctcggctgggtgcgtgacgaactcgtgatcgccggtgccggccgagaaggccggctgcgggaggccctggccggcgtcgaggacgactacgacgtgatcctgatcgactgtgctccatcgctcgatcagctcacgatcaacggcctggtggccgcccagggtgtcatcgtcgtgacgcactcgaagttgtggagcgccaacggcctcgcccagctgctcgacaccatcgacagcgtgcgcagctactacaacggcgcgctgcgcgtggcgggcatcatcgtcaaccagcacgaggagaacaccatcagcgggaaaacctggctcgacgagctgcatcaggctgccgagtcccggaagctgaccgtgcttgacccgccgatccccaagcgtgtcgtcatcgccgataccgtcgaggccgcgcgcggtctcgacgagtggggaagtgccgaggcggccgcgctcggccagttgtacgcccaccacctgacctgcatcgaaggagccctgtgatgacccgtccagccccccgaaagtcctcattgagcggatcaactccggtcgccccgccggctcagacggcgccggcaccgtctgccgcacctaccccccacaaggccgatgagtcacagacgagcagcaccacgaggaagtggcggcacaaggtgtcgttctaccaggacccggccgacaccgaccgggtgcgcggggcgatcctttacacgatgacgaccgagggcaaccggaacctgagccagttcgtcaacgatgccgtcatggccaaggtggtcgagctggaagtcaagtacaacgatggccagccattccccgctgtgggagcccgaggactaccccagggcggtgcagccgccgccggtgagtagaggaccatcgaccgtcgggggcttcaccatgcccccgaccctcggtcatcctgatcctcttgtcgatggtggtgacagtgggggattcacgcctcgttcagatcagaggaagtctcaccgcgtgattagtactatcaaatctgacagtactaacagagcagatagggttccctaggtcgagctgtatcacgccgacaaccagtgagccagtgatctacgaggggcgcaatatgcacccgatcggtagccgcgaaggcctcgccctgccccgatagtactatcaccactatcaatggtgctagtggtgagtttcttccattgatgacaacagcacagtgctgccgtctgtgtgcgggccaccagcccgcacacagttgccgtcgaggacgttgttcatgctctgtggtggccggtcctgagggcggctcgcaggatctcccggcgctcacggcgacgagcctggtagccaaggtctgcatgttcggcggcgagacgggctttgagggttgcggcttctgcacggcggtggagttggtcgtcgatgagttgggcgcgggccagacgccgcttatgggggttgtcgtgggtgaggggggcgtcgaggctgccgtcgtgggttagggccagggctgctcgttcggcgtcgtcgaggccgatgtggtggacggtcacgggtgcggtggtgacgtcgaggatgtccaggtggatgttgtggccgccgccgggggcttcggggaagtctggtgggctggcctggccggtgtcggggtcataccaggacaggccgatgatctcggcccagggtgggggcgggcagacggctcgcagaagggtgtgggccaggaacgtgttgcgggccatgatgcctccaagggtgaaaagcagtcgagtagcgatgacggcggggtagccgtctgctgggctgaggccgaccgggcccatgtcctcgatgctcttgtgctgcggccataccccaaagctaccaaacagtctttttaatctcaaagatacaaacagtgcttgacatattatctgcagcgaaagatactttcatcatggtggctgatcatgattacgcgactcctgacgatgagtggatgacacctcctcaggtggcccgtgtgattccgaacaccactgctcaggctgtccggcgctgggctgaggagggtcagcttcctggggcgtttcgtactccttctgggcgttggcatattccgtggtcggctgtggtgggcatcatggggtttgatccgcgtgagtccgcatcaccgagtgatcgtcaccagagctgacagagtcgtcgatgagctttcgagtgcagagctgatggcacgacggtctggatacttgtggagatgagagacgaccacatccagtcatggtcggggtacaccgaggggcagattcagcagtgctggcacgatgaggttgcccctgccattgactcgctcatggagcaggtaaggtctgttgccgagactcctgtgccgccgggttcgagattttacggcgatgagcagtgggccaagccttttcatccgtctactgcgatctgcggttcaatgggtccgccagcgatcacttgcacgcgctgaagctcctcgtctgggaagcgaacgtccaccatgtctatgcgccgtacacccttgctcgtgcatctattgaggcatcgtctactgctgtgtggctgttgagcacgaagacgcgcggagaacgtgtgctgcgagccttgcgatggtacgcgcaggattgtcacgactcgtgcaggttcatggatgatgagcagtatcgtgaccacctattgcggcgcattgaggggactgtcgctgcgggaaatctcgactcgcgcgctgctaggaaacggtaccgtgcaaccgatgttgtcgatgaggctgatcagctggttcccggaactctgagggcgtggcgagctttttctggtatggcccattcccgtatgtgggcatccagggggctgctcgacatggaagtgctgtccagtggccaaggaatggttacggcgaaggtgacgagcggatcggcccaaatcctttgggccgtcgtggcagctctgaatgttgctctcagtgccgctcgcttgtggcgtgattcgatgtgctcaccgtttgctgttgcccagtcggtagacgcgatgccagaggcgtttcgccgccctgtttagggtctgatcggggtagtgggtgttcacggggtcccaggttggccatggggcggcttggtgatgtgagttgggttgtgtggcagcctgggtgttgggtgtggcttcgttggccacgaaggcatgctcttccttgtgctgggacttgagtccccagtgctctcccctttgctagtggggggtggggtccccggaggtaggtcctccggggactttttctatgtctgtccgtgccccaggatttcgtatctaggcagtaccaattttgggttagttggaggtttctttggtaatggacagggtgagggtgatgaagaggtggccgtccttggtggcagaaattttctcgaacttcagctgaatgttgttatcagccactatctgttgggcggtgaggtgctcggagagcttctggaatccttcgcggatccacaggttgtaggggttggtgaccgagaccgaagggtatgggtcgaccttcagcgtcaggactggctggtctgggttgagggagttgatcttcaccagtttggggtaccggtcgcactcatgtgtctcttgtgttgggggccagcagtcgggggcccattcctcccagtggtcacgcatctcacgaagtactttcctgcatctcagcctctgcaggagctcgcgcgccaccgatgggagggctgccatgatgagggcaaggactgcgaacccgatgatgtaattgaccgtgtccctcgtcacgccgttcttgccgaggattccgatggcgaacgcgatgacgacaccgcccaggcacaggtgcatggggtcatgctgtgatggtttttcttcttcagcgactggtggggctatagtcatgtgtgccccttagtactaagtgatactggtgggttgcttttccccggtggccgtgtgcaagacggccaccggggttttccttcatgttcctgattttatctgcccggtgtggcgttttcatctttgtgtgggtggttcgcctggggtcttggagtgtggtgacgcggtgatggtcacggtgacggtgactgtggcgcgtggcgggtgaggtggttctttcctggtctggtgtgtggcccaggtgagtgtggtgatgagggccagggtgaggatgatgaccagggtggggagtagtttgtctggccggtgtcgccgggcttggtggcgcggcatgtttttccagggtgtgtctccgaacaggtcgtcgtcggaggggtcgtcgtggttcatagggtggccttggcgatggtggtgggcgagtttggtccaggtgatggtgccgtcggaggcgatgtggcggtcggcgggcagggtgtggacggtccatccggcgtcggtgagggcggtggtgaaggatttcttgatggatcgtttgggtaggtcgatgggggcgtgggtgccgacccagatgcaccggtttttgaggtgggtggcgccgaggtggttcatgtcgcggaccatgttttgggtgagtgtgagggtgtcggggtcccattggacggggatgatgatgtggtctgcgatggtgatggcgtgttgccaggcggcgtcgaggtcgttgtttccggtgtcgaggatgatgacgtggaagcggcttcttagggcggtgatgatgcggtcgaggtcgtcggcggtggggggtgtgatgaggctgttgtggttgtcggtgatggtgggtaggcatgtgatggtggcccagccttctggttgccaggagatgtaggggccgaggtcgcggggttgggaggcgaatcctgggtgacgggctgcgcgggcgaggtcgatgacggtgttgtcggtgtggcggggtgcgcgggtggagagggtgccgcgtgggttgatttccacgacgacgatgtcgtcgtgtcctgctgtggtggcgagggcttgggcaaggatgacggccagcggggttttgccggtgccgcctttgaggttggcgagggtgatgatgtggtcggtgagttgggcgggtgcggcggtgtggtgagggttggcggtgaggttggcgatggtgaacagggcatcgagatcgtcggtggtgttctgctcggtgggttgggggtcgccggagatgatcgggtcggcgcggcgcggctgccatgccggcctcaccactgtcacgaccaccacgggtctgctggcgctgtgtgggtgtcgtcggcgatgactcacgatcggcagtctcaccatcgtctcggtgatgctcggctagcgctggacccggtcaagttcgggccggctcacccagtggtgatgactcggtcacagaaccgctgccggtcgttatctcggacgtctcgactcctccagtcctgatgggcgttggagccacctacacctactctcagaacgaccccgacctcgtgtggggcgggggcagatgtcacttgggccaatcgagagcccaggtgatggggaaagcaggggtgtgatatctgtcctggaaaactgggcagctgctaccgtggattgacggatctccacgaaagaagggaatgcgaccatgcagatcaccgtcaagaccatcaaagatcatcgggttcgcactgtccagaccgccatgagcagcgccttggggattggttcccaggtagacatgctcgcccccggcggttccaccagctcgagttccggttcatgctgctcgtgctcgacctgcgcggtagtggcgcagcctcaagactgaacggctggtcagccccaggggcgtggcgctcatcgcgtcacgccccttctattcgctggacagggtgcgcgagctgaggaacatcgcggtgtgtgcgatgacgaggggcaggagcaagtctgtgcgggttgccaagtagccctgcgcgatggccatcacgctggccccgacggcggcgaagacacctccgatacgtcgcttcatgccgccgaattgcatcaggacgaataggactcccgcggtccacatccctccgggcatgcatctgggaaagatgaaccggaagatgatctcttcacaggagagctggagtactagcagcgtagcccccacggggagactcacctctactgacagacggatcgtcttcatccacccacccgagctggcatcgaccatttcggtggccatgcgcgaccggtggcctcgtgcctctcgctgcgtgtcgatccagccgagcagtccgtggacgctctccgctaggactcctgacgcgacagtctcaccaattcctaagcccacggcgaggaccgcgacgcccccctgcacggcaggctgtgtgacttggtggtcccaccaacccgccggcaggaccatgcgtgcgaggctgcacacgagcaggaggtggagggtcacgacgagcgacatctggaataccgcttgccgttcggcgatggtggcgttgggaaagagcggtaggccggcacgggcagcggcgctcgacagcttccgcaagagcggtttggagacgaagtagtaggcgacgtacagcgccagcgctgtcgcgatgatgatcatcggtctgccaccgagctgacccgccgatagccgtttctgttccaccaatactggctgttgtagatcaggtggcccagaacacaggcccagatcccccagaagatgaacaggatagtccccaaggcggcgagcgggatcttggagaggacctgtccccgtccgaacaccgagtggccgcaagcaaacaagagtgctcccacagcggtgagcgcgagccaggccggggttgctcgcagactgatcaccgggaccccgacccggaagccgacctcttctcctacagcgatgactagcaactgccacagcggcatgttctgaacggagcgcgcgactcgggctcgagtcacccacacgggctgttgagcgctcacatcaccactcaggtaccccggtgaggcacttcgcttagtactggggcccgatgtgcgagcattcgtgatgtgtcgcaggatccggttgtcaagccaagaggccagcagggctccggcgacagtgacgggtagcccgatcagcacgaggccccagccatgcggtgccgagaggtttctggccggcgtgcacgcgaggcaggcaaatgccatcactgccagcactacgacgtagatggtcgcataattcgacttgcgggtgacgttgccgaccatcttggccaaagtcgctggggaccagctgatgagtgcgatggtggtcagcaggaagcaggaccagacagacatccggcgcactcaggggtatgggtgcggctgtgggttttggaaaccgccatatgcggcgtagcgggggtgtgcccgcatgggtgcgctgggcagtgacagggcgagcagcccaggcgcccagagcctgacacagtgcagtcccagcccctggatctctatggtggtgaaatcttcgatgtacaggggtgacacacaggtgatgctgttgaccacgctctttaccagttccgcccccgtgtgggtgtcgtcaggtggcaggtcttcggcttgggcaatggtgcccgcgtcgaatttcgccacaactgattgcgcggcctgatagttcctcgcgtagtaggagacgttcgagtcgaggtcaagcatgtcctccgtggacatactggacgcgtcggcctcggcgtcgaaagacgtccataccgcgagcatccgaaccccgctgcactcgagaaacgccttgtacatggctgcttccagacccgcgtctgcacctaggccgacggcgacgaggggaagttggttgccactaccgaccatcatgcatgccacggtgaaatgcttgagcccgggagtcggaagccagtagaaacgcagttcgtggcttcggcccgctgcacgttccacgagccgctggatgcgctggaggcggggtccttcgacgcggatgcgcacaggtgacgaggctccataccacaggcccatcgcggcatctacctggatcaattcataagccgcggacagcgttgcggcgacgcgtgaagtgtggacggcggtgccggtcgtcacggccgttcccagccacggctcaccgtcgtgccgacgggggttgtaacccaggtaaaagaactgcgccgggatccactcctgccgggaggtcccgacacggggagtcttgacccatgtcatgggcaagtcgtcgcgataggtgtcgaacgcacctccagccactcgttgcgcgaagccgaatgcgcccagatcgagaacttcgtcctcggtccgggcgaggagttcctgacgagtcgcccagcgccgttcgaagggactatggagaatcccggtacccgcgcagtagcgctcgacggcctccgcgtagaccttgatctctgcctcaaactcgttcagccccaccccaccgatgtggtagctacccggcttggggtcgggccggtcaagcagtgcgtgcatccccgtgagttccccaccgttcacccgcacgcgggggccgagcgcggggtgcagcgagtagccgacggaagtcaccagcccgcatagcgggctgtaggtgcgccgcctgagccgggctgcggtctcgacggggtcgctatcctggcgaagcttcatcgctcgccccctgccgccagccactcacggatgtcgtagtacaggtccggagcggtttcaacctgcgctggtgcatcaaaacgggacataggtaggacgtcgttgtaggcgatctccatcgtcggtatgtagaccgacaacactttgttgcgcgtcgtgttgaggccgttgcgggcgatgctgacagcctcatgcgcgacgtgcgcggccaagatcgcgcgcaccgacgctgccacggccggcgctccggcccttacgcggtcggcagcggccacccgcatccaggacaggtagctctgccgttcgcgcaggttcatcgcgacccgctgctcgaaggtccggtaggacgaggtcgcaccagggacgacgtagggacccacgtacaaggccggcccgtctacagctgcgtggagccacgacaggtgggcgcgtcgggcgaacaggtcaagggcgcgcagcatagccgggttgttctgcgccagcgctaccacaaggagtggctgcaggtccggcgccgaacccagcaacgccaacatctgggaggcctcctgctccatgtgcaactcgtcggccgactgctcaagccgcaggcctgcgaagagggtggctgatggctgcgtgtcgtcagcgaggacggtagcctgcagcccctctccctcgagaatctgctggatatcgccggcgaggagcgcgtcgtcgctgaatacccacaccgggcgcgtctctctacctccatccatcttgtcctcaacgttttcgaccagcgcaccgatcgatgctaggtgggccatcacgtcgtcaagggccgcgcgggtcaatccgggcacccgggacacgatctcgggcggctgcagtccttggctcaacaagtccaaggccggccacagggtcccggtggcgtcgtcgtcctccagcgttgtgctctcggcgttccagacgcctcgacggaactccaccctgtccatcgagtaaggcaccatcatgaggcccggtgaaatgtggttggtcactttggctcctgtacagcctaggcttggacgcccacggtcatggtgtgggtcgcggtttggaaaatcccgtcgaggttgagtgcctgattgagttcgtcctcgtagaagcttgaggactcgactgaggcaagaccgagccccgtgcagaccaagttgatctgttgtgcgatcgccccgacttcttgaagggcgaacctcaaacccctggctccgtacttccgcatcgccctccacggcgagatgacgaacaccaagtgcactccggccgcatccgattgctccacggccggctcgccggccatcgaattcctcacgccgcgacagccctcttcaccggtcacgggcaccagtcgatcgatgaccggcgagtagcggtagacgccgcgactcaagccggacacccgttgtgcggacatgaagatagacacgggatacagccctccaccagacgggacagcgcgtacattataccgcacgatatcaccgctcgaacgtgggacatccacgtgccccgtcacaccggcagcacctctcagaaacgcagctacgtcacgcaggtctagggattcgccggtgtagttccgtccgctgcgccggcgggcgatcacttgctcgaggggtgcgcgcaccctgctggacctgggaagttcgatcacatcggcagcgaacgtgtcgcgatccatctgtccgtacgtaacgatcatggggtcaacgaaatagtcgccgaccgagacgttgaactccatatccccccgggcgatgcgcgaggcgagcaagaagtctgcagctgcgttagacagccccggcccatcagtgttgtcgcagcggaactcgtgggtccgaaaccccacaccttccgtgcccgggctctgcgctcgatacgacgtgatcgcagaactagccttccttaaaccgcccggagtagctaccatgaccgtcccctctgaggtctcccgaacacttgcgacaatagcagcatgtgggggcagccgccagaggcgggcatccttgtctcgacaaccattgacctccggattcgatatgtgcataatcatagtcgtgccaacacgaaacgtgtacgtctcggaagacgacctagacctgttcgccgaagccaccgagatcgctggaggcctgtccgcagcggtgttggaggccttgcgcagctacgtagacaggcaccatcgcgcggccggcggattcgacgagatcgagctggagctgcagaacgacggtatcgaccaccgtgtcaccttcatgggtcgccgcctgatacacatccgccgtccagatcccgagggaacccgcatagacactgtctacttgaccgccaaacaccaattcgccgttgccaccaaaatccaacgacggctgccagactggacggccggccacgagcacatctggtccgacccggagacctggaatcgggagttctggatcgcaggtgacaagacgatggccgtgtatcccagccttgacaaactccgcgaagctgaccccaatgtggccgaacgcgccgaggccgcggtcaaaatcccgccgttcgaggtcctggacatctgatgacagaatcatcatcttcccggcggcaattggcaatgccggtgctgtcagtcacggatctagccaagaaatacgtggttcatggcggctacgaggtcccggcactcaacggtgtctcgtttgacctgcacccgggagagatgctgggtttgttcgggccaaacggtgctggaaagacgacgctggtcaggatcatcgcgggcctcttatcggcagattctggagacgtccactggggatcggatcaaggtcgggccaggttaggctacgtgtcccaaaagggtggactgcagtacgggctcacgtgccgggaagagatggtcttccacgcacaatgcttcggccagtccgccaagcaggcccggactagcgtcgacgaggtcgccgcgatgctgcactgcgattacctgatggagtgggacgtcggaaggctctccggtgggcaacgccgaatcatcgaggtagggctagcactcgtcaatcaaccatcggtcgtcctgctcgacgagcccaccctgggcctggaccccgcaacacgcctgtcgttgtggcaaacggtaaagtcggcacgccgtgagaccggtgctgccttcctcgtcaccacccactacattgacgaggtggccgagcacctgtccaacgtcagcgtgatcaaccacggaaccgtcgtcgccaacggctcgcccgcgcacatccgagaaatgttcgcgaccggggaagtaacgctcggcgtggccgaggatacggtggacagtgcggtggacgtgttggctgggaccgcgttcgaggcgcaccccaccgaaaccgtcccggggatcgtggtcaggtccaggcatcccgacgtggacgcggccaagatcatcaccatcctggctggtcatggcatctcggtggactccatatccgtacgcgaggcgaccttggaagaggcgtttctcacgatcacaggcagtcgagacccggagaggcaaatcccatgaacacttgcttcaggcgatatgcggcgatgtcgctgagagcgcggcgtgatttggccctgacattcatccagcccctcgtctacctagccctcttcggaccgctcttcgtcacgacgatgaagatgtcgcagagagctaccgccgctacgggttactccctatacatcacgggcctgtccatccaaatggccatgacgatcggtgccttcgcggggctaaccatcatcctcgaataccgactcggcatcctcgaacggatctggagcacccccctcacggggagcaagatgatggcggggcgaatcgcgcgcgacgtcgttatgatgatgatgccgatactggtcgtcttcatcatcggcctggtgctgggaacacgccccagcccactgggcctggcgacctacttcgtgacagtgctcggcacaggagccacgttcgccggggtctcctacgcggtggcactcagaacgaagagcgaggcagcgctatccgcgatcttcaacctcatcctgctacccatcctcctgctgtcggggatcatgctgcccatgtcgttcgcaccacactggatcgccaccgctgcccacgtgaacccgttgtggtacctggtgcaaggcgcgcggaaccagttcagcgttctagggctcgtggcggcggccccatggagttgggctgtggccatcgtcatgtcagccgctgccttcggctgggcaagccacgaattcaacaagaggcgctgacacaaagaatggtgccgggaacccaggtccccggcaccaccgagtgcactcgcgacgtcaacgcaccgttgcggtcactgcgcaggtcgagcacgaggacgacgagcccgcgctgctgcaggtcgagccgccaggcgcgagcaggtcgacgttagcgtcggcgccgccgaagacggacgtgacggccggctgagaggtgcggatgcggtgctccagcgaggaggtggtggtgagtttcatgggaggtgctcctaggagtgagacgagaacaaaccctagcgataggttagcagtccgcaaccgactccgggaatagtagaagcgcgcatccgtagcggaagaccttagcctgattacagtgaccctgttcgcgtctcaacattattccacacccccgagcagcgaacgacaccgcgatgatgatccgtcgcctctccaccgaagaactccgcgcccacatcgcaccgggccgccgtcccgtgcatcagacctgccgtcaacgtcggccatgaagctgggaaggtggctctcgtctaggagcagacgcgggacgcctcctccaggttgggccggggaagtgtccggttcttgatgtaggtggcggtccctattgatgggcgttgaccgtgggaatgcggtcggcgaagggggtggcgaacccgttgagcgcaggcttccagcgcatgcatcaacgctgtctgccggccaccggcaagcctcacccgcccgtcatggccatcatcgaggtgccggtgaatcctcgacacatgatcccaactcccccggaggggcttccggggctgttcagccaccagatcagccaggcggcgagcccgactctgccacccggaccctgcagagcgtgcctgctgccgtcgtgtcgtgtcgggccagtgggccaccagatcggccacatccgtcttggcccatct

SEQ ID NO: 111 - DNA, 16494 bp, Propionibacterium acnes
  source 1..16494: mol_type = genomic DNA
gtgttccagtgcctcgcgggcgtgatgttcttcttcggcaccttcttgccacatgcttcgcgcttcagcctcgccatccaagcgaacctggactgtgaacgagtcctcatcgggtccgtcctcattccacgcggcaatgatcccacgggcctcgtctgcgacctgactcaacttcatcgcctgcccgacagccccgagagccggaatctcgaacacccagatattcgcctcagccgagacctcacgatgggcgatcacttcgtaggtcgtctcaccttctactgtcgtgtccattacttccactccttcggaattttcacgcctgctcgctccagctgtgccaggacaccaactgacgtcagctggtgtcctgctggtatcgatacgcgcccggctccgccggggcgtccccagatttcatggcttcccttggcgttccgcagacgggcccatccttgagaacggagcagcttgaggacgtccttagttttctgcggtttcacacatcatagtatagccccacttaacttgtaaactaagcccctgtttacattttagttggtgcatgtgatccctgctcttatgacgtcgcccgacctggcgccttagacatgcactgttcatcctcaaccacactcaccgtcacgggtccgaaggcgaggtctatcaccattcgcatcgatgaagttgaagcaggatcgtccgcatcacgcactgccgatccggacagacgccaccggccgtaccgactgtttacgatctgccaccgcagactgctgccataaccgctatcacctctgatagtacgtttagtactatcagaggtgattcaagattctcctgtcgagcagccctacagtcacgaagtcctgcgatcgtcatcgcttaaggcagacggatggccatcggggaccactcgcaaagcaggggcgatcagcaacagtgatgtgccatgagcaagtactggtgcaccggctgtttactccgcccctagataaaccacgggtgcaggggtggacaccacaccatgaccgatgtggtgcccaccccatggctcacaggcaggccctatcgccgggagcactgctgcagatgaggctcagtaacctgccatgtctcacctggggccaaggtgccaagctccccacggaatctcaggcatcggaaaccagcagccgaacttccacagcatgagcgccctacgaaaaagcaggccgccgacggttctcaagaactcgccggcggcctgcatcgccactcgaactgtaaccgtggtccgaccccgtgcacaggtaagctccacactcccaccaggcatggccgaggcagtaccaagttgccgtggcccatcggcagatttggttaaattttgaaaagtcatatagactccttctgtaaatttttaaatctcataggactctcgccatcgccagccagcttcgacaggagtcccgatgtttcaccgagtgaaatatcggcaccgtttgagttgacctaaagctcaaaagatgctagaatccatcttacctcgttaggggcgttttgtcaaacgcccctatattgcgtgtcttcgcgcgtcgtagcgctgatgctgcgcctgtgtcgactatccgtttgtaagtactttcgatgacaccagcagtggctactcatgactggtgcgtgcgggtctaaagcagcagggaaaggaatcgcagtagaagccgcttgattcctatcacccctgatggtactatcagtactaacagagcagggcttactcgatgcgtgagaatcggggacatgctgagcctctcgtaggtcattggcctgctgggcgtcagtgtggcgcggttcgatccagtgaactctatcagctctgttagtactgtcagagttgatatattcgaccccaggaggagcccatgagttacatcgttcgcaccggaaatttggtcgacacccccgagctgcgtgagggagagcatggcccgtacacctacgctcgcgtcatcgtgtccgatcgcattcgccaggaggacggcagctacgtcaacgggccagcgatcgcctacgacgtcttggcgggtggcagccaagccgtgaatctggttgaagccgccaaggcgagcggcaacatccgcatcatgttcgcgggccgttaccgcgtcaccgagtggcggggtgagcagggcactcgtatccagcatgaggtccgagccgacgaagtgagcgtgagcctgctcggtcagagggtgaccgtggagcggcctcgaggtgacgtggcatccaaggagagcacgtcgttctgattgagtccgggggcacggtggtcgccgtggtaaaccgtgcccctgacagtactattgacactattggaggtatcagtgtgactgctcaaattttcgccttgtgcaaccagaagggtggcgtcggaaagtcgacatcgacgtttcatctggcccgtgccgcggtgttgcgtggccagcgtgtgcttgtcgtcgacaacgacccccagggcaacctgacgtctgtcgcggccgccgagcccgtgggggaggatcaggcggggctggccgatgtgctcagcgcgcgtgctccagagaccctccgcgatgtgatcgtgccgggaatctggtctggcctcgatgtcgtgccgacgtctggcatcacgctcggctgggtgcgtgacgaactcgtgatcgccggtgccggccgagaaggccggctgcgggaggccctggccggcgtcgaggacgactacgacgtgatcctgatcgactgtgctccatcgctcgatcagctcacgatcaacggcctggtggccgcccagggtgtcatcgtcgtgacgcactcgaagttgtggagcgccaacggcctcgcccagctgctcgacaccatcgacagcgtgcgcagctactacaacggcgcgctgcgcgtggcgggcatcatcgtcaaccagcacgaggagaacaccatcagcgggaaaacctggctcgacgagctgcatcaggctgccgagtcccggaagctgaccgtgcttgacccgccgatccccaagcgtgtcgtcatcgccgataccgtcgaggccgcgcgcggtctcgacgagtggggaagtgccgaggcggccgcgctcggccagttgtacgcccaccacctgacctgcatcgaaggagccctgtgatgacccgtccagccccccgaaagtcctcattgagcggatcaactccggtcgccccgccggctcagacggcgccggcaccgtctgccgcacctaccccccacaaggccgatgagtcacagacgagcagcaccacgaggaagtggcggcacaaggtgtcgttctaccaggacccggccgacaccgaccgggtgcgcggggcgatcctttacacgatgacgaccgagggcaaccggaacctgagccagttcgtcaacgatgccgtcatggccaaggtggtcgagctggaagtcaagtacaacgatggccagccattccccgctgtgggagcccgaggactaccccagggcggtgcagccgccgccggtgagtagaggaccatcgaccgtcgggggcttcaccatgcccccgaccctcggtcatcctgatcctcttgtcgatggtggtgacagtgggggattcacgcctcgttcagatcagaggaagtctcaccgcgtgattagtactatcaaatctgacagtactaacagagcagatagggttccctaggtcgagctgtatcacgccgacaaccagtgagccagtgatctacgaggggcgcaatatgcacccgatcggtagccgcgaaggcctcgccctgccccgatagtactatcaccactatcaatggtgctagtggtgagtttcttccattgatgacaacagcacagtgctgccgtctgtgtgcgggccaccagcccgcacacagttgccgtcgaggacgttgttcatgctctgtggtggccggtcctgagggcggctcgcaggatctcccggcgctcacggcgacgagcctggtagccaaggtctgcatgttcggcggcgagacgggctttgagggttgcggcttctgcacggcggtggagttggtcgtcgatgagttgggcgcgggccagacgccgcttatgggggttgtcgtgggtgaggggggcgtcgaggctgccgtcgtgggttagggccagggctgctcgttcggcgtcgtcgaggccgatgtggtggacggtcacgggtgcggtggtgacgtcgaggatgtccaggtggatgttgtggccgccgccgggggcttcggggaagtctggtgggctggcctggccggtgtcggggtcataccaggacaggccgatgatctcggcccagggtgggggcgggcagacggctcgcagaagggtgtgggccaggaacgtgttgcgggccatgatgcctccaagggtgaaaagcagtcgagtagcgatgacggcggggtagccgtctgctgggctgaggccgaccgggcccatgtcctcgatgctcttgtgctgcggccataccccaaagctaccaaacagtctttttaatctcaaagatacaaacagtgcttgacatattatctgcagcgaaagatactttcatcatggtggctgatcatgattacgcgactcctgacgatgagtggatgacacctcctcaggtggcccgtgtgattccgaacaccactgctcaggctgtccggcgctgggctgaggagggtcagcttcctggggcgtttcgtactccttctgggcgttggcatattccgtggtcggctgtggtgggcatcatggggtttgatccgcgtgagtccgcatcaccgagtgatcgtcaccagagctgacagagtcgtcgatgagctttcgagtgcagagctgatggcacgacggtctggatacttgtggagatgagagacgaccacatccagtcatggtcggggtacaccgaggggcagattcagcagtgctggcacgatgaggttgcccctgccattgactcgctcatggagcaggtaaggtctgttgccgagactcctgtgccgccgggttcgagattttacggcgatgagcagtgggccaagccttttcatccgtctactgcgatctgcggttcaatgggtccgccagcgatcacttgcacgcgctgaagctcctcgtctgggaagcgaacgtccaccatgtctatgcgccgtacacccttgctcgtgcatctattgaggcatcgtctactgctgtgtggctgttgagcacgaagacgcgcggagaacgtgtgctgcgagccttgcgatggtacgcgcaggattgtcacgactcgtgcaggttcatggatgatgagcagtatcgtgaccacctattgcggcgcattgaggggactgtcgctgcgggaaatctcgactcgcgcgctgctaggaaacggtaccgtgcaaccgatgttgtcgatgaggctgatcagctggttcccggaactctgagggcgtggcgagctttttctggtatggcccattcccgtatgtgggcatccagggggctgctcgacatggaagtgctgtccagtggccaaggaatggttacggcgaaggtgacgagcggatcggcccaaatcctttgggccgtcgtggcagctctgaatgttgctctcagtgccgctcgcttgtggcgtgattcgatgtgctcaccgtttgctgttgcccagtcggtagacgcgatgccagaggcgtttcgccgccctgtttagggtctgatcggggtagtgggtgttcacggggtcccaggttggccatggggcggcttggtgatgtgagttgggttgtgtggcagcctgggtgttgggtgtggcttcgttggccacgaaggcatgctcttccttgtgctgggacttgagtccccagtgctctcccctttgctagtggggggtggggtccccggaggtaggtcctccggggactttttctatgtctgtccgtgccccaggatttcgtatctaggcagtaccaattttgggttagttggaggtttctttggtaatggacagggtgagggtgatgaagaggtggccgtccttggtggcagaaattttctcgaacttcagctgaatgttgttatcagccactatctgttgggcggtgaggtgctcggagagcttctggaatccttcgcggatccacaggttgtaggggttggtgaccgagaccgaagggtatgggtcgaccttcagcgtcaggactggctggtctgggttgagggagttgatcttcaccagtttggggtaccggtcgcactcatgtgtctcttgtgttgggggccagcagtcgggggcccattcctcccagtggtcacgcatctcacgaagtactttcctgcatctcagcctctgcaggagctcgcgcgccaccgatgggagggctgccatgatgagggcaaggactgcgaacccgatgatgtaattgaccgtgtccctcgtcacgccgttcttgccgaggattccgatggcgaacgcgatgacgacaccgcccaggcacaggtgcatggggtcatgctgtgatggtttttcttcttcagcgactggtggggctatagtcatgtgtgccccttagtactaagtgatactggtgggttgcttttccccggtggccgtgtgcaagacggccaccggggttttccttcatgttcctgattttatctgcccggtgtggcgttttcatctttgtgtgggtggttcgcctggggtcttggagtgtggtgacgcggtgatggtcacggtgacggtgactgtggcgcgtggcgggtgaggtggttctttcctggtctggtgtgtggcccaggtgagtgtggtgatgagggccagggtgaggatgatgaccagggtggggagtagtttgtctggccggtgtcgccgggcttggtggcgcggcatgtttttccagggtgtgtctccgaacaggtcgtcgtcggaggggtcgtcgtggttcatagggtggccttggcgatggtggtgggcgagtttggtccaggtgatggtgccgtcggaggcgatgtggcggtcggcgggcagggtgtggacggtccatccggcgtcggtgagggcggtggtgaaggatttcttgatggatcgtttgggtaggtcgatgggggcgtgggtgccgacccagatgcaccggtttttgaggtgggtggcgccgaggtggttcatgtcgcggaccatgttttgggtgagtgtgagggtgtcggggtcccattggacggggatgatgatgtggtctgcgatggtgatggcgtgttgccaggcggcgtcgaggtcgttgtttccggtgtcgaggatgatgacgtggaagcggcttcttagggcggtgatgatgcggtcgaggtcgtcggcggtggggggtgtgatgaggctgttgtggttgtcggtgatggtgggtaggcatgtgatggtggcccagccttctggttgccaggagatgtaggggccgaggtcgcggggttgggaggcgaatcctgggtgacgggctgcgcgggcgaggtcgatgacggtgttgtcggtgtggcggggggcgcgggtggagagggtgccgcgtgggttgatttccacgacgacgatgtcgtcgtgtcctgctgtggtggcgagggcttgggcaaggatgacggccagcggggttttgccggtgccgcctttgaggttggcgagggtgatgatgtggtcggtgagttgggcgggtgcggcggtgtggtgagggttggcggtgaggttggcgatggtgaacagggcatcgagatcgtcggtggtgttctgctcggtgggttgggggtcgccggagatgatcgggtcggcgcggcgcggctgccatgccggcctcaccactgtcacgaccaccacgggtctgctggcgctgtgtgggtgtcgtcggcgatgactcacgatcggcagtctcaccatcgtctcggtgatgctcggctagcgctggacccggtcaagttcgggccggctcacccagtggtgatgactcggtcacagaaccgctgccggtcgttatctcggacgtctcgactcctccagtcctgatgggcgttggagccacctacacctactctcagaacgaccccgacctcgtgtggggcgggggcagatgtcacttgggccaatcgagagcccaggtgatggggaaagcaggggtgtgatatctgtcctggaaaactgggcagctgctaccgtggattgacggatctccacgaaagaagggaatgcgaccatgcagatcaccgtcaagaccatcaaagatcatcgggttcgcactgtccagaccgccatgagcagcgccttggggattggttcccaggtagacatgctcgcccccggcggttccaccagctcgagttccggttcatgctgctcgtgctcgacctgcgcggtagtggcgcagcctcaagactgaacggctggtcagccccaggggcgtggcgctcatcgcgtcacgccccttctattcgctggacagggtgcgcgagctgaggaacatcgcggtgtgtgcgatgacgaggggcaggagcaagtctgtgcgggttgccaagtagccctgcgcgatggccatcacgctggccccgacggcggcgaagacacctccgatacgtcgcttcatgccgccgaattgcatcaggacgaataggactcccgcggtccacatccctccgggcatgcatctgggaaagatgaaccggaagatgatctcttcacaggagagctggagtactagcagcgtagcccccacggggagactcacctctactgacagacggatcgtcttcatccacccacccgagctggcatcgaccatttcggtggccatgcgcgaccggtggcctcgtgcctctcgctgcgtgtcgatccagccgagcagtccgtggacgctctccgctaggactcctgacgcgacagtctcaccaattcctaagcccacggcgaggaccgcgacgcccccctgcacggcaggctgtgtgacttggtggtcccaccaacccgccggcaggaccatgcgtgcgaggctgcacacgagcaggaggtggagggtcacgacgagcgacatctggaataccgcttgccgttcggcgatggtggcgttgggaaagagcggtaggccggcacgggcagcggcgctcgacagcttccgcaagagcggtttggagacgaagtagtaggcgacgtacagcgccagcgctgtcgcgatgatgatcatcggtctgccaccgagctgacccgccgatagccgtttctgttccaccaatactggctgttgtagatcaggtggcccagaacacaggcccagatcccccagaagatgaacaggatagtccccaaggcggcgagcgggatcttggagaggacctgtccccgtccgaacaccgagtggccgcaagcaaacaagagtgctcccacagcggtgagcgcgagccaggccggggttgctcgcagactgatcaccgggaccccgacccggaagccgacctcttctcctacagcgatgactagcaactgccacagcggcatgttctgaacggagcgcgcgactcgggctcgagtcacccacacgggctgttgagcgctcacatcaccactcaggtaccccggtgaggcacttcgcttagtactggggcccgatgtgcgagcattcgtgatgtgtcgcaggatccggttgtcaagccaagaggccagcagggctccggcgacagtgacgggtagcccgatcagcacgaggccccagccatgcggtgccgagaggtttctggccggcgtgcacgcgaggcaggcaaatgccatcactgccagcactacgacgtagatggtcgcataattcgacttgcgggtgacgttgccgaccatcttggccaaagtcgctggggaccagctgatgagtgcgatggtggtcagcaggaagcaggaccagacagacatccggcgcactcaggggtatgggtgcggctgtgggttttggaaaccgccatatgcggcgtagcgggggtgtgcccgcatgggtgcgctgggcagtgacagggcgagcagcccaggcgcccagagcctgacacagtgcagtcccagcccctggatctctatggtggtgaaatcttcgatgtacaggggtgacacacaggtgatgctgttgaccacgctctttaccagttccgcccccgtgtgggtgtcgtcaggtggcaggtcttcggcttgggcaatggtgcccgcgtcgaatttcgccacaactgattgcgcggcctgatagttcctcgcgtagtaggagacgttcgagtcgaggtcaagcatgtcctccgtggacatactggacgcgtcggcctcggcgtcgaaagacgtccataccgcgagcatccgaaccccgctgcactcgagaaacgccttgtacatggctgcttccagacccgcgtctgcacctaggccgacggcgacgaggggaagttggttgccactaccgaccatcatgcatgccacggtgaaatgcttgagcccgggagtcggaagccagtagaaacgcagttcgtggcttcggcccgctgcacgttccacgagccgctggatgcgctggaggcggggtccttcgacgcggatgcgcacaggtgacgaggctccataccacaggcccatcgcggcatctacctggatcaattcataagccgcggacagcgttgcggcgacgcgtgaagtgtggacggcggtgccggtcgtcacggccgttcccagccacggctcaccgtcgtgccgacgggggttgtaacccaggtaaaagaactgcgccgggatccactcctgccgggaggtcccgacacggggagtcttgacccatgtcatgggcaagtcgtcgcgataggtgtcgaacgcacctccagccactcgttgcgcgaagccgaatgcgcccagatcgagaacttcgtcctcggtccgggcgaggagttcctgacgagtcgcccagcgccgttcgaagggactatggagaatcccggtacccgcgcagtagcgctcgacggcctccgcgtagaccttgatctctgcctcaaactcgttcagccccaccccaccgatgtggtagctacccggcttggggtcgggccggtcaagcagtgcgtgcatccccgtgagttccccaccgttcacccgcacgcgggggccgagcgcggggtgcagcgagtagccgacggaagtcaccagcccgcatagcgggctgtaggtgcgccgcctgagccgggctgcggtctcgacggggtcgctatcctggcgaagcttcatcgctcgccccctgccgccagccactcacggatgtcgtagtacaggtccggagcggtttcaacctgcgctggtgcatcaaaacgggacataggtaggacgtcgttgtaggcgatctccatcgtcggtatgtagaccgacaacactttgttgcgcgtcgtgttgaggccgttgcgggcgatgctgacagcctcatgcgcgacgtgcgcggccaagatcgcgcgcaccgacgctgccacggccggcgctccggcccttacgcggtcggcagcggccacccgcatccaggacaggtagctctgccgttcgcgcaggttcatcgcgacccgctgctcgaaggtccggtaggacgaggtcgcaccagggacgacgtagggacccacgtacaaggccggcccgtctacagctgcgtggagccacgacaggtgggcgcgtcgggcgaacaggtcaagggcgcgcagcatagccgggttgttctgcgccagcgctaccacaaggagtggctgcaggtccggcgccgaacccagcaacgccaacatctgggaggcctcctgctccatgtgcaactcgtcggccgactgctcaagccgcaggcctgcgaagagggtggctgatggctgcgtgtcgtcagcgaggacggtagcctgcagcccctctccctcgagaatctgctggatatcgccggcgaggagcgcgtcgtcgctgaatacccacaccgggcgcgtctctctacctccatccatcttgtcctcaacgttttcgaccagcgcaccgatcgatgctaggtgggccatcacgtcgtcaagggccgcgcgggtcaatccgggcacccgggacacgatctcgggcggctgcagtccttggctcaacaagtccaaggccggccacagggtcccggtggcgtcgtcgtcctccagcgttgtgctctcggcgttccagacgcctcgacggaactccaccctgtccatcgagtaaggcaccatcatgaggcccggtgaaatgtggttggtcactttggctcctgtacagcctaggcttggacgcccacggtcatggtgtgggtcgcggtttggaaaatcccgtcgaggttgagtgcctgattgagttcgtcctcgtagaagcttgaggactcgactgaggcaagaccgagccccgtgcagaccaagttgatctgttgtgcgatcgccccgacttcttgaagggcgaacctcaaacccctggctccgtacttccgcatcgccctccacggcgagatgacgaacaccaagtgcactccggccgcatccgattgctccacggccggctcgccggccatcgaattcctcacgccgcgacagccctcttcaccggtcacgggcaccagtcgatcgatgaccggcgagtagcggtagacgccgcgactcaagccggacacccgttgtgcggacatgaagatagacacgggatacagccctccaccagacgggacagcgcgtacattataccgcacgatatcaccgctcgaacgtgggacatccacgtgccccgtcacaccggcagcacctctcagaaacgcagctacgtcacgcaggtctagggattcgccggtgtagttccgtccgctgcgccggcgggcgatcacttgctcgaggggtgcgcgcaccctgctggacctgggaagttcgatcacatcggcagcgaacgtgtcgcgatccatctgtccgtacgtaacgatcatggggtcaacgaaatagtcgccgaccgagacgttgaactccatatccccccgggcgatgcgcgaggcgagcaagaagtctgcagctgcgttagacagccccggcccatcagtgttgtcgcagcggaactcgtgggtccgaaaccccacaccttccgtgcccgggctctgcgctcgatacgacgtgatcgcagaactagccttccttaaaccgcccggagtagctaccatgaccgtcccctctgaggtctcccgaacacttgcgacaatagcagcatgtgggggcagccgccagaggcgggcatccttgtctcgacaaccattgacctccggattcgatatgtgcataatcatagtcgtgccaacacgaaacgtgtacgtctcggaagacgacctagacctgttcgccgaagccaccgagatcgctggaggcctgtccgcagcggtgttggaggccttgcgcagctacgtagacaggcaccatcgcgcggccggcggattcgacgagatcgagctggagctgcagaacgacggtatcgaccaccgtgtcaccttcatgggtcgccgcctgatacacatccgccgtccagatcccgagggaacccgcatagacactgtctacttgaccgccaaacaccaattcgccgttgccaccaaaatccaacgacggctgccagactggacggccggccacgagcacatctggtccgacccggagacctggaatcgggagttctggatcgcaggtgacaagacgatggccgtgtatcccagccttgacaaactccgcgaagctgaccccaatgtggccgaacgcgccgaggccgcggtcaaaatcccgccgttcgaggtcctggacatctgatgacagaatcatcatcttcccggcggcaattggcaatgccggtgctgtcagtcacggatctagccaagaaatacgtggttcatggcggctacgaggtcccggcactcaacggtgtctcgtttgacctgcacccgggagagatgctgggtttgttcgggccaaacggtgctggaaagacgacgctggtcaggatcatcgcgggcctcttatcggcagattctggagacgtccactggggatcggatcaaggtcgggccaggttaggctacgtgtcccaaaagggtggactgcagtacgggctcacgtgccgggaagagatggtcttccacgcacaatgcttcggccagtccgccaagcaggcccggactagcgtcgacgaggtcgccgcgatgctgcactgcgattacctgatggagtgggacgtcggaaggctctccggtgggcaacgccgaatcatcgaggtagggctagcactcgtcaatcaaccatcggtcgtcctgctcgacgagcccaccctgggcctggaccccgcaacacgcctgtcgttgtggcaaacggtaaagtcggcacgccgtgagaccggtgctgccttcctcgtcaccacccactacattgacgaggtggccgagcacctgtccaacgtcagcgtgatcaaccacggaaccgtcgtcgccaacggctcgccagcgcacatccgagaaatgttcgcgaccggggaagtaacgctcggcgtggccgaggatacggtggacagtgcggtggacgtgttggctgggaccgcgttcgaggcgcaccccaccgaaaccgtcccggggatcgtggtcaggtccaggcatcccgacgtggacgcggccaagatcatcaccatcctggctggtcatggcatctcggtggactccatatccgtacgcgaggcgaccttggaagaggcgtttctcacgatcacaggcagtcgagacccggagaggcaaatcccatgaacacttgcttcaggcgatatgcggcgatgtcgctgagagcgcggcgtgatttggccctgacattcatccagcccctcgtctacctagccctcttcggaccgctcttcgtcacgacgatgaagatgtcgcagagagctaccgccgctacgggttactccctatacatcacgggcctgtccatccaaatggccatgacgatcggtgccttcgcggggctaaccatcatcctcgaataccgactcggcatcctcgaacggatctggagcacccccctcacggggagcaagatgatggcggggcgaatcgcgcgcgacgtcgttatgatgatgatgccgatactggtcgtcttcatcatcggcctggtgctgggaacacgccccagcccactgggcctggcgacctacttcgtgacagtgctcggcacaggagccacgttcgccggggtctcctacgcggtggcactcagaacgaagagcgaggcagcgctatccgcgatcttcaacctcatcctgctacccatcctcctgctgtcggggatcatgctgcccatgtcgttcgcaccacactggatcgccaccgctgcccacgtgaacccgttgtggtacctggtgcaaggcgcgcggaaccagttcagcgttctagggctcgtggcggcggccccatggagttgggctgtggccatcgtcatgtcagccgctgccttcggctgggcaagccacgaattcaacaagaggcgctgacacaaagaatggtgccgggaacccaggtccccggcaccaccgagtgcactcgcgacgtcaacgcaccgttgcggtcactgcgcaggtcgagcacgaggacgacgagcccgcgctgctgcaggtcgagccgccaggcgcgagcaggtcgacgttagcgtcggcgccgccgaagacggacgtgacggccggctgagaggtgcggatgcggtgctccagcgaggaggtggtggtgagtttcatgggaggtgctcctaggagtgagacgagaacaaaccctagcgataggttagcagtccgcaaccgactccgggaatagtagaagcgcgcatccgtagcggaagaccttagcctgattacagtgaccctgttcgcgtctcaacattattccacacccccgagcagcgaacgacaccgcgatgatgatccgtcgcctctccaccgaagaactccgcgcccacatcgcaccgggccgccgtcccgtgcatcagacctgccgtcaacgtcggccatgaagctgggaaggtggctctcgtctaggagcagacgcgggacgcctcctccaggttgggccggggaagtgtccggttcttgatgtaggtggcggtccctattgatgggcgttgaccgtgggaatgcggtcggcgaagggggtggcgaacccgttgagcgcaggcttccagcgcatgcatcaacgctgtctgccggccaccggcaagcctcacccgcccgtcatggccatcatcgaggtgccggtgaatcctcgacacatgatcccaactcccccggaggggcttccggggctgttcagccaccagatcagccaggcggcgagcccgactctgccacccggaccctgcagagcgtgcctgctgccgtcgtgtcgtgtcgggccagtgggccaccagatcggccacatccgtcttggcccatct

SEQ ID NO: 112 - DNA, 16494 bp, Propionibacterium acnes
  source 1..16494: mol_type = genomic DNA
gtgttccagtgcctcgcgggcgtgatgttcttcttcggcaccttcttgccacatgcttcgcgcttcagcctcgccatccaagcgaacctggactgtgaacgagtcctcatcgggtccgtcctcattccacgcggcaatgatcccacgggcctcgtctgcgacctgactcaacttcatcgcctgcccgacagccccgagagccggaatctcgaacacccagatattcgcctcagccgagacctcacgatgggcgatcacttcgtaggtcgtctcaccttctactgtcgtgtccattacttccactccttcggaattttcacgcctgctcgctccagctgtgccaggacaccaactgacgtcagctggtgtcctgctggtatcgatacgcgcccggctccgccggggcgtccccagatttcatggcttcccttggcgttccgcagacgggcccatccttgagaacggagcagcttgaggacgtccttagttttctgcggtttcacacatcatagtatagccccacttaacttgtaaactaagcccctgtttacattttagttggtgcatgtgatccctgctcttatgacgtcgcccgacctggcgccttagacatgcactgttcatcctcaaccacactcaccgtcacgggtccgaaggcgaggtctatcaccattcgcatcgatgaagttgaagcaggatcgtccgcatcacgcactgccgatccggacagacgccaccggccgtaccgactgtttacgatctgccaccgcagactgctgccataaccgctatcacctctgatagtacgtttagtactatcagaggtgattcaagattctcctgtcgagcagccctacagtcacgaagtcctgcgatcgtcatcgcttaaggcagacggatggccatcggggaccactcgcaaagcaggggcgatcagcaacagtgatgtgccatgagcaagtactggtgcaccggctgtttactccgcccctagataaaccacgggtgcaggggtggacaccacaccatgaccgatgtggtgcccaccccatggctcacaggcaggccctatcgccgggagcactgctgcagatgaggctcagtaacctgccatgtctcacctggggccaaggtgccaagctccccacggaatctcaggcatcggaaaccagcagccgaacttccacagcatgagcgccctacgaaaaagcaggccgccgacggttctcaagaactcgccggcggcctgcatcgccactcgaactgtaaccgtggtccgaccccgtgcacaggtaagctccacactcccaccaggcatggccgaggcagtaccaagttgccgtggcccatcggcagatttggttaaattttgaaaagtcatatagactccttctgtaaatttttaaatctcataggactctcgccatcgccagccagcttcgacaggagtcccgatgtttcaccgagtgaaatatcggcaccgtttgagttgacctaaagctcaaaagatgctagaatccatcttacctcgttaggggcgttttgtcaaacgcccctatattgcgtgtcttcgcgcgtcgtagcgctgatgctgcgcctgtgtcgactatccgtttgtaagtactttcgatgacaccagcagtggctactcatgactggtgcgtgcgggtctaaagcagcagggaaaggaatcgcagtagaagccgcttgattcctatcacccctgatggtactatcagtactaacagagcagggcttactcgatgcgtgagaatcggggacatgctgagcctctcgtaggtcattggcctgctgggcgtcagtgtggcgcggttcgatccagtgaactctatcagctctgttagtactgtcagagttgatatattcgaccccaggaggagcccatgagttacatcgttcgcaccggaaatttggtcgacacccccgagctgcgtgagggagagcatggcccgtacacctacgctcgcgtcatcgtgtccgatcgcattcgccaggaggacggcagctacgtcaacgggccagcgatcgcctacgacgtcttggcgggtggcagccaagccgtgaatctggttgaagccgccaaggcgagcggcaacatccgcatcatgttcgcgggccgttaccgcgtcaccgagtggcggggtgagcagggcactcgtatccagcatgaggtccgagccgacgaagtgagcgtgagcctgctcggtcagagggtgaccgtggagcggcctcgaggtgacgtggcatccaaggagagcacgtcgttctgattgagtccgggggcacggtggtcgccgtggtaaaccgtgcccctgacagtactattgacactattggaggtatcagtgtgactgctcaaattttcgccttgtgcaaccagaagggtggcgtcggaaagtcgacatcgacgtttcatctggcccgtgccgcggtgttgcgtggccagcgtgtgcttgtcgtcgacaacgacccccagggcaacctgacgtctgtcgcggccgccgagcccgtgggggaggatcaggcggggctggccgatgtgctcagcgcgcgtgctccagagaccctccgcgatgtgatcgtgccgggaatctggtctggcctcgatgtcgtgccgacgtctggcatcacgctcggctgggtgcgtgacgaactcgtgatcgccggtgccggccgagaaggccggctgcgggaggccctggccggcgtcgaggacgactacgacgtgatcctgatcgactgtgctccatcgctcgatcagctcacgatcaacggcctggtggccgcccagggtgtcatcgtcgtgacgcactcgaagttgtggagcgccaacggcctcgcccagctgctcgacaccatcgacagcgtgcgcagctactacaacggcgcgctgcgcgtggcgggcatcatcgtcaaccagcacgaggagaacaccatcagcgggaaaacctggctcgacgagctgcatcaggctgccgagtcccggaagctgaccgtgcttgacccgccgatccccaagcgtgtcgtcatcgccgataccgtcgaggccgcgcgcggtctcgacgagtggggaagtgccgaggcggccgcgctcggccagttgtacgcccaccacctgacctgcatcgaaggagccctgtgatgacccgtccagccccccgaaagtcctcattgagcggatcaactccggtcgccccgccggctcagacggcgccggcaccgtctgccgcacctaccccccacaaggccgatgagtcacagacgagcagcaccacgaggaagtggcggcacaaggtgtcgttctaccaggacccggccgacaccgaccgggtgcgcggggcgatcctttacacgatgacgaccgagggcaaccggaacctgagccagttcgtcaacgatgccgtcatggccaaggtggtcgagctggaagtcaagtacaacgatggccagccattccccgctgtgggagcccgaggactaccccagggcggtgcagccgccgccggtgagtagaggaccatcgaccgtcgggggcttcaccatgcccccgaccctcggtcatcctgatcctcttgtcgatggtggtgacagtgggggattcacgcctcgttcagatcagaggaagtctcaccgcgtgattagtactatcaaatctgacagtactaacagagcagatagggttccctaggtcgagctgtatcacgccgacaaccagtgagccagtgatctacgaggggcgcaatatgcacccgatcggtagccgcgaaggcctcgccctgccccgatagtactatcaccactatcaatggtgctagtggtgagtttcttccattgatgacaacagcacagtgctgccgtctgtgtgcgggccaccagcccgcacacagttgccgtcgaggacgttgttcatgctctgtggtggccggtcctgagggcggctcgcaggatctcccggcgctcacggcgacgagcctggtagccaaggtctgcatgttcggcggcgagacgggctttgagggttgcggcttctgcacggcggtggagttggtcgtcgatgagttgggcgcgggccagacgccgcttatgggggttgtcgtgggtgaggggggcgtcgaggctgccgtcgtgggttagggccagggctgctcgttcggcgtcgtcgaggccgatgtggtggacggtcacgggtgcggtggtgacgtcgaggatgtccaggtggatgttgtggccgccgccgggggcttcggggaagtctggtgggctggcctggccggtgtcggggtcataccaggacaggccgatgatctcggcccagggtgggggcgggcagacggctcgcagaagggtgtgggccaggaacgtgttgcgggccatgatgcctccaagggtgaaaagcagtcgagtagcgatgacggcggggtagccgtctgctgggctgaggccgaccgggcccatgtcctcgatgctcttgtgctgcggccataccccaaagctaccaaacagtctttttaatctcaaagatacaaacagtgcttgacatattatctgcagcgaaagatactttcatcatggtggctgatcatgattacgcgactcctgacgatgagtggatgacacctcctcaggtggcccgtgtgattccgaacaccactgctcaggctgtccggcgctgggctgaggagggtcagcttcctggggcgtttcgtactccttctgggcgttggcatattccgtggtcggctgtggtgggcatcatggggtttgatccgcgtgagtccgcatcaccgagtgatcgtcaccagagctgacagagtcgtcgatgagctttcgagtgcagagctgatggcacgacggtctggatacttgtggagatgagagacgaccacatccagtcatggtcggggtacaccgaggggcagattcagcagtgctggcacgatgaggttgcccctgccattgactcgctcatggagcaggtaaggtctgttgccgagactcctgtgccgccgggttcgagattttacggcgatgagcagtgggccaagccttttcatccgtctactgcgatctgcggttcaatgggtccgccagcgatcacttgcacgcgctgaagctcctcgtctgggaagcgaacgtccaccatgtctatgcgccgtacacccttgctcgtgcatctattgaggcatcgtctactgctgtgtggctgttgagcacgaagacgcgcggagaacgtgtgctgcgagccttgcgatggtacgcgcaggattgtcacgactcgtgcaggttcatggatgatgagcagtatcgtgaccacctattgcggcgcattgaggggactgtcgctgcgggaaatctcgactcgcgcgctgctaggaaacggtaccgtgcaaccgatgttgtcgatgaggctgatcagctggttcccggaactctgagggcgtggcgagctttttctggtatggcccattcccgtatgtgggcatccagggggctgctcgacatggaagtgctgtccagtggccaaggaatggttacggcgaaggtgacgagcggatcggcccaaatcctttgggccgtcgtggcagctctgaatgttgctctcagtgccgctcgcttgtggcgtgattcgatgtgctcaccgtttgctgttgcccagtcggtagacgcgatgccagaggcgtttcgccgccctgtttagggtctgatcggggtagtgggtgttcacggggtcccaggttggccatggggcggcttggtgatgtgagttgggttgtgtggcagcctgggtgttgggtgtggcttcgttggccacgaaggcatgctcttccttgtgctgggacttgagtccccagtgctctcccctttgctagtggggggtggggtccccggaggtaggtcctccggggactttttctatgtctgtccgtgccccaggatttcgtatctaggcagtaccaattttgggttagttggaggtttctttggtaatggacagggtgagggtgatgaagaggtggccgtccttggtggcagaaattttctcgaacttcagctgaatgttgttatcagccactatctgttgggcggtgaggtgctcggagagcttctggaatccttcgcggatccacaggttgtaggggttggtgaccgagaccgaagggtatgggtcgaccttcagcgtcaggactggctggtctgggttgagggagttgatcttcaccagtttggggtaccggtcgcactcatgtgtctcttgtgttgggggccagcagtcgggggcccattcctcccagtggtcacgcatctcacgaagtactttcctgcatctcagcctctgcaggagctcgcgcgccaccgatgggagggctgccatgatgagggcaaggactgcgaacccgatgatgtaattgaccgtgtccctcgtcacgccgttcttgccgaggattccgatggcgaacgcgatgacgacaccgcccaggcacaggtgcatggggtcatgctgtgatggtttttcttcttcagcgactggtggggctatagtcatgtgtgccccttagtactaagtgatactggtgggttgcttttccccggtggccgtgtgcaagacggccaccggggttttccttcatgttcctgattttatctgcccggtgtggcgttttcatctttgtgtgggtggttcgcctggggtcttggagtgtggtgacgcggtgatggtcacggtgacggtgactgtggcgcgtggcgggtgaggtggttctttcctggtctggtgtgtggcccaggtgagtgtggtgatgagggccagggtgaggatgatgaccagggtggggagtagtttgtctggccggtgtcgccgggcttggtggcgcggcatgtttttccagggtgtgtctccgaacaggtcgtcgtcggaggggtcgtcgtggttcatagggtggccttggcgatggtggtgggcgagtttggtccaggtgatggtgccgtcggaggcgatgtggcggtcggcgggcagggtgtggacggtccatccggcgtcggtgagggcggtggtgaaggatttcttgatggatcgtttgggtaggtcgatgggggcgtgggtgccgacccagatgcaccggtttttgaggtgggtggcgccgaggtggttcatgtcgcggaccatgttttgggtgagtgtgagggtgtcggggtcccattggacggggatgatgatgtggtctgcgatggtgatggcgtgttgccaggcggcgtcgaggtcgttgtttccggtgtcgaggatgatgacgtggaagcggcttcttagggcggtgatgatgcggtcgaggtcgtcggcggtggggggtgtgatgaggctgttgtggttgtcggtgatggtgggtaggcatgtgatggtggcccagccttctggttgccaggagatgtaggggtcgaggtcgcggggttgggaggcgaatcctgggtgacgggctgcgcgggcgaggtcgatgacggtgttgtcggtgtggcggggtgcgcgggtggagagggtgccgcgtgggttgatttccacgacgacgatgtcgtcgtgtcctgctgtggtggcgagggcttgggcaaggatgacggccagcggggttttgccggtgccgcctttgaggttggcgagggtgatgatgtggtcggtgagttgggcgggtgcggcggtgtggtgagggttggcggtgaggttggcgatggtgaacagggcatcgagatcgtcggtggtgttctgctcggtgggttgggggtcgccggagatgatcgggtcggcgcggcgcggctgccatgccggcctcaccactgtcacgaccaccacgggtctgctggcgctgtgtgggtgtcgtcggcgatgactcacgatcggcagtctcaccatcgtctcggtgatgctcggctagcgctggacccggtcaagttcgggccggctcacccagtggtgatgactcggtcacagaaccgctgccggtcgttatctcggacgtctcgactcctccagtcctgatgggcgttggagccacctacacctactctcagaacgaccccgacctcgtgtggggcgggggcagatgtcacttgggccaatcgagagcccaggtgatggggaaagcaggggtgtgatatctgtcctggaaaactgggcagctgctaccgtggattgacggatctccacgaaagaagggaatgcgaccatgcagatcaccgtcaagaccatcaaagatcatcgggttcgcactgtccagaccgccatgagcagcgccttggggattggttcccaggtagacatgctcgcccccggcggttccaccagctcgagttccggttcatgctgctcgtgctcgacctgcgcggtagtggcgcagcctcaagactgaacggctggtcagccccaggggcgtggcgctcatcgcgtcacgccccttctattcgctggacagggtgcgcgagctgaggaacatcgcggtgtgtgcgatgacgaggggcaggagcaagtctgtgcgggttgccaagtagccctgcgcgatggccatcacgctggccccgacggcggcgaagacacctccgatacgtcgcttcatgccgccgaattgcatcaggacgaataggactcccgcggtccacatccctccgggcatgcatctgggaaagatgaaccggaagatgatctcttcacaggagagctggagtactagcagcgtagcccccacggggagactcacctctactgacagacggatcgtcttcatccacccacccgagctggcatcgaccatttcggtggccatgcgcgaccggtggcctcgtgcctctcgctgcgtgtcgatccagccgagcagtccgtggacgctctccgctaggactcctgacgcgacagtctcaccaattcctaagcccacggcgaggaccgcgacgcccccctgcacggcaggctgtgtgacttggtggtcccaccaacccgccggcaggaccatgcgtgcgaggctgcacacgagcaggaggtggagggtcacgacgagcgacatctggaataccgcttgccgttcggcgatggtggcgttgggaaagagcggtaggccggcacgggcagcggcgctcgacagcttccgcaagagcggtttggagacgaagtagtaggcgacgtacagcgccagcgctgtcgcgatgatgatcatcggtctgccaccgagctgacccgccgatagccgtttctgttccaccaatactggctgttgtagatcaggtggcccagaacacaggcccagatcccccagaagatgaacaggatagtccccaaggcggcgagcgggatcttggagaggacctgtccccgtccgaacaccgagtggccgcaagcaaacaagagtgctcccacagcggtgagcgcgagccaggccggggttgctcgcagactgatcaccgggaccccgacccggaagccgacctcttctcctacagcgatgactagcaactgccacagcggcatgttctgaacggagcgcgcgactcgggctcgagtcacccacacgggctgttgagcgctcacatcaccactcaggtaccccggtgaggcacttcgcttagtactggggcccgatgtgcgagcattcgtgatgtgtcgcaggatccggttgtcaagccaagaggccagcagggctccggcgacagtgacgggtagcccgatcagcacgaggccccagccatgcggtgccgagaggtttctggccggcgtgcacgcgaggcaggcaaatgccatcactgccagcactacgacgtagatggtcgcataattcgacttgcgggtgacgttgccgaccatcttggccaaagtcgctggggaccagctgatgagtgcgatggtggtcagcaggaagcaggaccagacagacatccggcgcactcaggggtatgggtgcggctgtgggttttggaaaccgccatatgcggcgtagcgggggtgtgcccgcatgggtgcgctgggcagtgacagggcgagcagcccaggcgcccagagcctgacacagtgcagtcccagcccctggatctctatggtggtgaaatcttcgatgtacaggggtgacacacaggtgatgctgttgaccacgctctttaccagttccgcccccgtgtgggtgtcgtcaggtggcaggtcttcggcttgggcaatggtgcccgcgtcgaatttcgccacaactgattgcgcggcctgatagttcctcgcgtagtaggagacgttcgagtcgaggtcaagcatgtcctccgtggacatactggacgcgtcggcctcggcgtcgaaagacgtccataccgcgagcatccgaaccccgctgcactcgagaaacgccttgtacatggctgcttccagacccgcgtctgcacctaggccgacggcgacgaggggaagttggttgccactaccgaccatcatgcatgccacggtgaaatgcttgagcccgggagtcggaagccagtagaaacgcagttcgtggcttcggcccgctgcacgttccacgagccgctggatgcgctggaggcggggtccttcgacgcggatgcgcacaggtgacgaggctccataccacaggcccatcgcggcatctacctggatcaattcataagccgcggacagcgttgcggcgacgcgtgaagtgtggacggcggtgccggtcgtcacggccgttcccagccacggctcaccgtcgtgccgacgggggttgtaacccaggtaaaagaactgcgccgggatccactcctgccgggaggtcccgacacggggagtcttgacccatgtcatgggcaagtcgtcgcgataggtgtcgaacgcacctccagccactcgttgcgcgaagccgaatgcgcccagatcgagaacttcgtcctcggtccgggcgaggagttcctgacgagtcgcccagcgccgttcgaagggactatggagaatcccggtacccgcgcagtagcgctcgacggcctccgcgtagaccttgatctctgcctcaaactcgttcagccccaccccaccgatgtggtagctacccggcttggggtcgggccggtcaagcagtgcgtgcatccccgtgagttccccaccgttcacccgcacgcgggggccgagcgcggggtgcagcgagtagccgacggaagtcaccagcccgcatagcgggctgtaggtgcgccgcctgagccgggctgcggtctcgacggggtcgctatcctggcgaagcttcatcgctcgccccctgccgccagccactcacggatgtcgtagtacaggtccggagcggtttcaacctgcgctggtgcatcaaaacgggacataggtaggacgtcgttgtaggcgatctccatcgtcggtatgtagaccgacaacactttgttgcgcgtcgtgttgaggccgttgcgggcgatgctgacagcctcatgcgcgacgtgcgcggccaagatcgcgcgcaccgacgctgccacggccggcgctccggcccttacgcggtcggcagcggccacccgcatccaggacaggtagctctgccgttcgcgcaggttcatcgcgacccgctgctcgaaggtccggtaggacgaggtcgcaccagggacgacgtagggacccacgtacaaggccggcccgtctacagctgcgtggagccacgacaggtgggcgcgtcgggcgaacaggtcaagggcgcgcagcatagccgggttgttctgcgccagcgctaccacaaggagtggctgcaggtccggcgccgaacccagcaacgccaacatctgggaggcctcctgctccatgtgcaactcgtcggccgactgctcaagccgcaggcctgcgaagagggtggctgatggctgcgtgtcgtcagcgaggacggtagcctgcagcccctctccctcgagaatctgctggatatcgccggcgaggagcgcgtcgtcgctgaatacccacaccgggcgcgtctctctacctccatccatcttgtcctcaacgttttcgaccagcgcaccgatcgatgctaggtgggccatcacgtcgtcaagggccgcgcgggtcaatccgggcacccgggacacgatctcgggcggctgcagtccttggctcaacaagtccaaggccggccacagggtcccggtggcgtcgtcgtcctccagcgttgtgctctcggcgttccagacgcctcgacggaactccaccctgtccatcgagtaaggcaccatcatgaggcccggtgaaatgtggttggtcactttggctcctgtacagcctaggcttggacgcccacggtcatggtgtgggtcgcggtttggaaaatcccgtcgaggttgagtgcctgattgagttcgtcctcgtagaagcttgaggactcgactgaggcaagaccgagccccgtgcagaccaagttgatctgttgtgcgatcgccccgacttcttgaagggcgaacctcaaacccctggctccgtacttccgcatcgccctccacggcgagatgacgaacaccaagtgcactccggccgcatccgattgctccacggccggctcgccggccatcgaattcctcacgccgcgacagccctcttcaccggtcacgggcaccagtcgatcgatgaccggcgagtagcggtagacgccgcgactcaagccggacacccgttgtgcggacatgaagatagacacgggatacagccctccaccagacgggacagcgcgtacattataccgcacgatatcaccgctcgaacgtgggacatccacgtgccccgtcacaccggcagcacctctcagaaacgcagctacgtcacgcaggtctagggattcgccggtgtagttccgtccgctgcgccggcgggcgatcacttgctcgaggggtgcgcgcaccctgctggacctgggaagttcgatcacatcggcagcgaacgtgtcgcgatccatctgtccgtacgtaacgatcatggggtcaacgaaatagtcgccgaccgagacgttgaactccatatccccccgggcgatgcgcgaggcgagcaagaagtctgcagctgcgttagacagccccggcccatcagtgttgtcgcagcggaactcgtgggtccgaaaccccacaccttccgtgcccgggctctgcgctcgatacgacgtgatcgcagaactagccttccttaaaccgcccggagtagctaccatgaccgtcccctctgaggtctcccgaacacttgcgacaatagcagcatgtgggggcagccgccagaggcgggcatccttgtctcgacaaccattgacctccggattcgatatgtgcataatcatagtcgtgccaacacgaaacgtgtacgtctcggaagacgacctagacctgttcgccgaagccaccgagatcgctggaggcctgtccgcagcggtgttggaggccttgcgcagctacgtagacaggcaccatcgcgcggccggcggattcgacgagatcgagctggagctgcagaacgacggtatcgaccaccgtgtcaccttcatgggtcgccgcctgatacacatccgccgtccagatcccgagggaacccgcatagacactgtctacttgaccgccaaacaccaattcgccgttgccaccaaaatccaacgacggctgccagactggacgaccggccacgagcacatctggtccgacccggagacctggaatcgggagttctggatcgcaggtgacaagacgatggccgtgtatcccagccttgacaaactccgcgaagctgaccccaatgtggccgaacgcgccgaggccgcggtcaaaatcccgccgttcgaggtcctggacatctgatgacagaatcatcatcttcccggcggcaattggcaatgccggtgctgtcagtcacggatctagccaagaaatacgtggttcatggcggctacgaggtcccggcactcaacggtgtctcgtttgacctgcacccgggagagatgctgggtttgttcgggccaaacggtgctggaaagacgacgctggtcaggatcatcgcgggcctcttatcggcagattctggagacgtccactggggatcggatcaaggtcgggccaggttaggctacgtgtcccaaaagggtggactgcagtacgggctcacgtgccgggaagagatggtcttccacgcacaatgcttcggccagtccgccaagcaggcccggactagcgtcgacgaggtcgccgcgatgctgcactgcgattacctgatggagtgggacgtcggaaggctctccggtgggcaacgccgaatcatcgaggtagggctagcactcgtcaatcaaccatcggtcgtcctgctcgacgagcccaccctgggcctggaccccgcaacacgcctgtcgttgtggcaaacggtaaagtcggcacgccgtgagaccggtgctgccttcctcgtcaccacccactacattgacgaggtggccgagcacctgtccaacgtcagcgtgatcaaccacggaaccgtcgtcgccaacggctcgccagcgcacatccgagaaatgttcgcgaccggggaagtaacgctcggcgtggccgaggatacggtggacagtgcggtggacgtgttggctgggaccgcgttcgaggcgcaccccaccgaaaccgtcccggggatcgtggtcaggtccaggcatcccgacgtggacgcggccaagatcatcaccatcctggctggtcatggcatctcggtggactccatatccgtacgcgaggcgaccttggaagaggcgtttctcacgatcacaggcagtcgagacccggagaggcaaatcccatgaacacttgcttcaggcgatatgcggcgatgtcgctgagagcgcggcgtgatttggccctgacattcatccagcccctcgtctacctagccctcttcggaccgctcttcgtcacgacgatgaagatgtcgcagagagctaccgccgctacgggttactccctatacatcacgggcctgtccatccaaatggccatgacgatcggtgccttcgcggggctaaccatcatcctcgaataccgactcggcatcctcgaacggatctggagcacccccctcacggggagcaagatgatggcggggcgaatcgcgcgcgacgtcgttatgatgatgatgccgatactggtcgtcttcatcatcggcctggtgctgggaacacgccccagcccactgggcctggcgacctacttcgtgacagtgctcggcacaggagccacgttcgccggggtctcctacgcggtggcactcagaacgaagagcgaggcagcgctatccgcgatcttcaacctcatcctgctacccatcctcctgctgtcggggatcatgctgcccatgtcgttcgcaccacactggatcgccaccgctgcccacgtgaacccgttgtggtacctggtgcaaggcgcgcggaaccagttcagcgttctagggctcgtggcggcggccccatggagttgggctgtggccatcgtcatgtcagccgctgccttcggctgggcaagccacgaattcaacaagaggcgctgacacaaagaatggtgccgggaacccaggtccccggcaccaccgagtgcactcgcgacgtcaacgcaccgttgcggtcactgcgcaggtcgagcacgaggacgacgagcccgcgctgctgcaggtcgagccgccaggcgcgagcaggtcgacgttagcgtcggcgccgccgaagacggacgtgacggccggctgagaggtgcggatgcggtgctccagcgaggaggtggtggtgagtttcatgggaggtgctcctaggagtgagacgagaacaaaccctagcgataggttagcagtccgcaaccgactccgggaatagtagaagcgcgcatccgtagcggaagaccttagcctgattacagtgaccctgttcgcgtctcaacattattccacacccccgagcagcgaacgacaccgcgatgatgatccgtcgcctctccaccgaagaactccgcgcccacatcgcaccgggccgccgtcccgtgcatcagacctgccgtcaacgtcggccatgaagctgggaaggtggctctcgtctaggagcagacgcgggacgcctcctccaggttgggccggggaagtgtccggttcttgatgtaggtggcggtccctattgatgggcgttgaccgtgggaatgcggtcggcgaagggggtggcgaacccgttgagcgcaggcttccagcgcatgcatcaacgctgtctgccggccaccggcaagcctcacccgcccgtcatggccatcatcgaggtgccggtgaatcctcgacacatgatcccaactcccccggaggggcttccggggctgttcagccaccagatcagccaggcggcgagcccgactctgccacccggaccctgcagagcgtgcctgctgccgtcgtgtcgtgtcgggccagtgggccaccagatcggccacatccgtcttggcccatct

SEQ ID NO: 113 - DNA, 16493 bp, Propionibacterium acnes
  source 1..16493: mol_type = genomic DNA
gtgttccagtgcctcgcgggcgtgatgttcttcttcggcaccttcttgccacatgcttcgcgcttcagcctcgccatccaagcgaacctggactgtgaacgagtcctcatcgggtccgtcctcattccacgcggcaatgatcccacgggcctcgtctgcgacctgactcaacttcatcgcctgcccgacagccccgagagccggaatctcgaacacccagatattcgcctcagccgagacctcacgatgggcgatcacttcgtaggtcgtctcaccttctactgtcgtgtccattacttccactccttcggaattttcacgcctgctcgctccagctgtgccaggacaccaactgacgtcagctggtgtcctgctggtatcgatacgcgcccggctccgccggggcgtccccagatttcatggcttcccttggcgttccgcagacgggcccatccttgagaacggagcagcttgaggacgtccttagttttctgcagtttcacacatcatagtatagccccacttaacttgtaaactaagcccctgtttacattttagttggtgcatgtgatccctgctcttatgacgtcgcccgacctggcgccttagacatgcactgttcatcctcaaccacactcaccgtcacgggtccgaaggcgaggtctatcaccattcgcatcgatgaagttgaagcaggatcgtccgcatcacgcactgccgatccggacagacgccaccggccgtaccgactgtttacgatctgccaccgcagactgctgccataaccgctatcacctctgatagtacgtttagtactatcagaggtgattcaagattctcctgtcgagcagccctacagtcacgaagtcctgcgatcgtcatcgcttaaggcagacggatggccatcggggaccactcgcaaagcaggggcgatcagcaacagtgatgtgccatgagcaagtactggtgcaccggctgtttactccgcccctagataaaccacgggtgcaggggtggacaccacaccatgaccgatgtggtgcccaccccatggctcacaggcaggccctatcgccgggagcactgctgcagatgaggctcagtaacctgccatgtctcacctggggccaaggtgccaagctccccacggaatctcaggcatcggaaaccagcagccgaacttccacagcatgagcgccctacgaaaaagcaggccgccgacggttctcaagaactcgccggcggcctgcatcgccactcgaactgtaaccgtggtccgaccccgtgcacaggtaagctccacactcccaccaggcatggccgaggcagtaccaagttgccgtggcccatcggcagatttggttaaattttgaaaagtcatatagactccttctgtaaatttttaaatctcataggactctcgccatcgccagccagcttcgacaggagtcccgatgtttcaccgagtgaaatatcggcaccgtttgagttgacctaaagctcaaaagatgctagaatccatcttacctcgttaggggcgttttgtcaaacgcccctatattgcgtgtcttcgcgcgtcgtagcgctgatgctgcgcctgtgtcgactatccgtttgtaagtactttcgatgacaccagcagtggctactcatgactggtgcgtgcgggtctaaagcagcagggaaaggaatcgcagtagaagccgcttgattcctatcacccctgatggtactatcagtactaacagagcagggcttactcgatgcgtgagaatcggggacatgctgagcctctcgtaggtcattggcctgctgggcgtcagtgtggcgcggttcgatccagtgaactctatcagctctgttagtactgtcagagttgatatattcgaccccaggaggagcccatgagttacatcgttcgcaccggaaatttggtcgacacccccgagctgcgtgagggagagcatggcccgtacacctacgctcgcgtcatcgtgtccgatcgcattcgccaggaggacggcagctacgtcaacgggccagcgatcgcctacgacgtcttggcgggtggcagccaagccgtgaatctggttgaagccgccaaggcgagcggcaacatccgcatcatgttcgcgggccgttaccgcgtcaccgagtggcgggggagcagggcactcgtatccagcatgaggtccgagccgacgaagtgagcgtgagcctgctcggtcagagggtgaccgtggagcggcctcgaggtgacgtggcatccaaggagagcacgtcgttctgattgagtccgggggcacggtggtcgccgtggtaaaccgtgcccctgacagtactattgacactattggaggtatcagtgtgactgctcaaattttcgccttgtgcaaccagaagggtggcgtcggaaagtcgacatcgacgtttcatctggcccgtgccgcggtgttgcgtggccagcgtgtgcttgtcgtcgacaacgacccccagggcaacctgacgtctgtcgcggccgccgagcccgtgggggaggatcaggcggggctggccgatgtgctcagcgcgcgtgctccagagaccctccgcgatgtgatcgtgccgggaatctggtctggcctcgatgtcgtgccgacgtctggcatcacgctcggctgggtgcgtgacgaactcgtgatcgccggtgccggccgagaaggccggctgcgggaggccctggccggcgtcgaggacgactacgacgtgatcctgatcgactgtgctccatcgctcgatcagctcacgatcaacggcctggtggccgcccagggtgtcatcgtcgtgacgcactcgaagttgtggagcgccaacggcctcgcccagctgctcgacaccatcgacagcgtgcgcagctactacaacggcgcgctgcgcgtggcgggcatcatcgtcaaccagcacgaggagaacaccatcagcgggaaaacctggctcgacgagctgcatcaggctgccgagtcccggaagctgaccgtgcttgacccgccgatccccaagcgtgtcgtcatcgccgataccgtcgaggccgcgcgcggtctcgacgagtggggaagtgccgaggcggccgcgctcggccagttgtacgcccaccacctgacctgcatcgaaggagccctgtgatgacccgtccagccccccgaaagtcctcattgagcggatcaactccggtcgccccgccggctcagacggcgccggcaccgtctgccgcacctaccccccacaaggccgatgagtcacagacgagcagcaccacgaggaagtggcggcacaaggtgtcgttctaccaggacccggccgacaccgaccgggtgcgcggggcgatcctttacacgatgacgaccgagggcaaccggaacctgagccagttcgtcaacgatgccgtcatggccaaggtggtcgagctggaagtcaagtacaacgatggccagccattccccgctgtgggagcccgaggactaccccagggcggtgcagccgccgccggtgagtagaggaccatcgaccgtcgggggcttcaccatgcccccgaccctcggtcatcctgatcctcttgtcgatggtggtgacagtgggggattcacgcctcgttcagatcagaggaagtctcaccgcgtgattagtactatcaaatctgacagtactaacagagcagatagggttccctaggtcgagctgtatcacgccgacaaccagtgagccagtgatctacgaggggcgcaatatgcacccgatcggtagccgcgaaggcctcgccctgccccgatagtactatcaccactatcaatggtgctagtggtgagtttcttccattgatgacaacagcacagtgctgccgtctgtgtgcgggccaccagcccgcacacagttgccgtcgaggacgttgttcatgctctgtggtggccggtcctgagggcggctcgcaggatctcccggcgctcacggcgacgagcctggtagccaaggtctgcatgttcggcggcgagacgggctttgagggttgcggcttctgcacggcggtggagttggtcgtcgatgagttgggcgcgggccagacgccgcttatgggggttgtcgtgggtgaggggggcgtcgaggctgccgtcgtgggttagggccagggctgctcgttcggcgtcgtcgaggccgatgtggtggacggtcacgggtgcggtggtgacgtcgaggatgtccaggtggatgttgtggccgccgccgggggcttcggggaagtctggtgggctggcctggccggtgtcggggtcataccaggacaggccgatgatctcggcccagggtgggggcgggcagacggctcgcagaagggtgtgggccaggaacgtgttgcgggccatgatgcctccaagggtgaaaagcagtcgagtagcgatgacggcggggtagccgtctgctgggctgaggccgaccgggcccatgtcctcgatgctcttgtgctgcggccataccccaaagctaccaaacagtctttttaatctcaaagatacaaacagtgcttgacatattatctgcagcgaaagatactttcatcatggtggctgatcatgattacgcgactcctgacgatgagtggatgacacctcctcaggtggcccgtgtgattccgaacaccactgctcaggctgtccggcgctgggctgaggagggtcagcttcctggggcgtttcgtactccttctgggcgttggcatattccgtggtcggctgtggtgggcatcatggggtttgatccgcgtgagtccgcatcaccgagtgatcgtcaccagagctgacagagtcgtcgatgagctttcgagtgcagagctgatggcacgacggtctggatacttgtggagatgagagacgaccacatccagtcatggtcggggtacaccgaggggcagattcagcagtgctggcacgatgaggttgcccctgccattgactcgctcatggagcaggtaaggtctgttgccgagactcctgtgccgccgggttcgagattttacggcgatgagcagtgggccaagccttttcatccgtctactgcgatctgcggttcaatgggtccgccagcgatcacttgcacgcgctgaagctcctcgtctgggaagcgaacgtccaccatgtctatgcgccgtacacccttgctcgtgcatctattgaggcatcgtctactgctgtgtggctgttgagcacgaagacgcgcggagaacgtgtgctgcgagccttgcgatggtacgcgcaggattgtcacgactcgtgcaggttcatggatgatgagcagtatcgtgaccacctattgcggcgcattgaggggactgtcgctgcgggaaatctcgactcgcgcgctgctaggaaacggtaccgtgcaaccgatgttgtcgatgaggctgatcagctggttcccggaactctgagggcgtggcgagctttttctggtatggcccattcccgtatgtgggcatccagggggctgctcgacatggaagtgctgtccagtggccaaggaatggttacggcgaaggtgacgagcggatcggcccaaatcctttgggccgtcgtggcagctctgaatgttgctctcagtgccgctcgcttgtggcgtgattcgatgtgctcaccgtttgctgttgcccagtcggtagacgcgatgccagaggcgtttcgccgccctgtttagggtctgatcggggtagtgggtgttcacggggtcccaggttggccatggggcggcttggtgatgtgagttgggttgtgtggcagcctgggtgttgggtgtggcttcgttggccacgaaggcatgctcttccttgtgctgggacttgagtccccagtgctctcccctttgctagtggggggtggggtccccggaggtaggtcctccggggactttttctatgtctgtccgtgccccaggatttcgtatctaggcagtaccaattttgggttagttggaggtttctttggtaatggacagggtgagggtgatgaagaggtggccgtccttggtggcagaaattttctcgaacttcagctgaatgttgttatcagccactatctgttgggcggtgaggtgctcggagagcttctggaatccttcgcggatccacaggttgtaggggttggtgaccgagaccgaagggtatgggtcgaccttcagcgtcaggactggctggtctgggttgagggagttgatcttcaccagtttggggtaccggtcgcactcatgtgtctcttgtgttgggggccagcagtcgggggcccattcctcccagtggtcacgcatctcacgaagtactttcctgcatctcagcctctgcaggagctcgcgcgccaccgatgggagggctgccatgatgagggcaaggactgcgaacccgatgatgtaattgaccgtgtccctcgtcacgccgttcttgccgaggattccgatggcgaacgcgatgacgacaccgcccaggcacaggtgcatggggtcatgctgtgatggtttttcttcttcagcgactggtggggctatagtcatgtgtgccccttagtactaagtgatactggtgggttgcttttccccggtggccgtgtgcaagacggccaccggggttttccttcatgttcctgattttatctgcccggtgtggcgttttcatctttgtgtgggtggttcgcctggggtcttggagtgtggtgacgcggtgatggtcacggtgacggtgactgtggcgcgtggcgggtgaggtggttctttcctggtctggtgtgtggcccaggtgagtgtggtgatgagggccagggtgaggatgatgaccagggtggggagtagtttgtctggccggtgtcgccgggcttggtggcgcggcatgtttttccagggtgtgtctccgaacaggtcgtcgtcggaggggtcgtcgtggttcatagggtggccttggcgatggtggtgggcgagtttggtccaggtgatggtgccgtcggaggcgatgtggcggtcggcgggcagggtgtggacggtccatccggcgtcggtgagggcggtggtgaaggatttcttgatggatcgtttgggtaggtcgatgggggcgtgggtgccgacccagatgcaccggtttttgaggtgggtggcgccgaggtggttcatgtcgcggaccatgttttgggtgagtgtgagggtgtcggggtcccattggacggggatgatgatgtggtctgcgatggtgatggcgtgttgccaggcggcgtcgaggtcgttgtttccggtgtcgaggatgatgacgtggaagcggcttcttagggcggtgatgatgcggtcgaggtcgtcggcggtggggggtgtgatgaggctgttgtggttgtcggtgatggtgggtaggcatgtgatggtggcccagccttctggttgccaggagatgtaggggccgaggtcgcggggttgggaggcgaatcctgggtgacgggctgcgcgggcgaggtcgatgacggtgttgtcggtgtggcggggtgcgcgggtggagagggtgccgcgtgggttgatttccacgacgacgatgtcgtcgtgtcctgctgtggtggcgagggcttgggcaaggatgacggccagcggggttttgccggtgccgcctttgaggttggcgagggtgatgatgtggtcggtgagttgggcgggtgcggcggtgtggtgagggttggcggtgaggttggcgatggtgaacagggcatcgagatcgtcggtggtgttctgctcggtgggttgggggtcgccggagatgatcgggtcggcgcggcgcggctgccatgccggcctcaccactgtcacgaccaccacgggtctgctggcgctgtgtgggtgtcgtcggcgatgactcacgatcggcagtctcaccatcgtctcggtgatgctcggctagcgctggacccggtcaagttcgggccggctcacccagtggtgatgactcggtcacagaaccgctgccggtcgttatctcggacgtctcgactcctccagtcctgatgggcgttggagccacctacacctactctcagaacgaccccgacctcgtgtggggcgggggcagatgtcacttgggccaatcgagagcccaggtgatggggaaagcaggggtgtgatatctgtcctggaaaactgggcagctgctaccgtggattgacggatctccacgaaagaagggaatgcgaccatgcagatcaccgtcaagaccatcaaagatcatcgggttcgcactgtccagaccgccatgagcagcgccttggggattggttcccaggtagacatgctcgcccccggcggttccaccagctcgagttccggttcatgctgctcgtgctcgacctgcgcggtagtggcgcagcctcaagactgaacggctggtcagccccaggggcgtggcgctcatcgcgtcacgccccttctattcgctggacagggtgcgcgagctgaggaacatcgcggtgtgtgcgatgacgaggggcaggagcaagtctgtgcgggttgccaagtagccctgcgcgatggccatcacgctggccccgacggcggcgaagacacctccgatacgtcgcttcatgccgccgaattgcatcaggacgaataggactcccgcggtccacatccctccgggcatgcatctgggaaagatgaaccggaagatgatctcttcacaggagagctggagtactagcagcgtagcccccacggggagactcacctctactgacagacggatcgtcttcatccacccacccgagctggcatcgaccatttcggtggccatgcgcgaccggtggcctcgtgcctctcgctgcgtgtcgatccagccgagcagtccgtggacgctctccgctaggactcctgacgcgacagtctcaccaattcctaagcccacggcgaggaccgcgacgcccccctgcacggcaggctgtgtgacttggtggtcccaccaacccgccggcaggaccatgcgtgcgaggctgcacacgagcaggaggtggagggtcacgacgagcgacatctggaataccgcttgccgttcggcgatggtggcgttgggaaagagcggtaggccggcacgggcagcggcgctcgacagcttccgcaagagcggtttggagacgaagtagtaggcgacgtacagcgccagcgctgtcgcgatgatgatcatcggtctgccaccgagctgacccgccgatagccgtttctgttccaccaatactggctgttgtagatcaggtggcccagaacacaggcccagatcccccagaagatgaacaggatagtccccaaggcggcgagcgggatcttggagaggacctgtccccgtccgaacaccgagtggccgcaagcaaacaagagtgctcccacagcggtgagcgcgagccaggccggggttgctcgcagactgatcaccgggaccccgacccggaagccgacctcttctcctacagcgatgactagcaactgccacagcggcatgttctgaacggagcgcgcgactcgggctcgagtcacccacacgggctgttgagcgctcacatcaccactcaggtaccccggtgaggcacttcgcttagtactggggcccgatgtgcgagcattcgtgatgtgtcgcaggatccggttgtcaagccaagaggccagcagggctccggcgacagtgacgggtagcccgatcagcacgaggccccagccatgcggtgccgagaggtttctggccggcgtgcacgcgaggcaggcaaatgccatcactgccagcactacgacgtagatggtcgcataattcgacttgcgggtgacgttgccgaccatcttggccaaagtcgctggggaccagctgatgagtgcgatggtggtcagcaggaagcaggaccagacagacatccggcgcactcaggggtatgggtgcggctgtgggttttggaaaccgccatatgcggcgtagcgggggtgtgcccgcatgggtgcgctgggcagtgacagggcgagcagcccaggcgcccagagcctgacacagtgcagtcccagcccctggatctctatggtggtgaaatcttcgatgtacaggggtgacacacaggtgatgctgttgaccacgctctttaccagttccgcccccgtgtgggtgtcgtcaggtggcaggtcttcggcttgggcaatggtgcccgcgtcgaatttcgccacaactgattgcgcggcctgatagttcctcgcgtagtaggagacgttcgagtcgaggtcaagcatgtcctccgtggacatactggacgcgtcggcctcggcgtcgaaagacgtccataccgcgagcatccgaaccccgctgcactcgagaaacgccttgtacatggctgcttccagacccgcgtctgcacctaggccgacggcgacgaggggaagttggttgccactaccgaccatcatgcatgccacggtgaaatgcttgagcccgggagtcggaagccagtagaaacgcagttcgtggcttcggcccgctgcacgttccacgagccgctggatgcgctggaggcggggtccttcgacgcggatgcgcacaggtgacgaggctccataccacaggcccatcgcggcatctacctggatcaattcataagccgcggacagcgttgcggcgacgcgtgaagtgtggacggcggtgccggtcgtcacggccgttcccagccacggctcaccgtcgtgccgacgggggttgtaacccaggtaaaagaactgcgccgggatccactcctgccgggaggtcccgacacggggagtcttgacccatgtcatgggcaagtcgtcgcgataggtgtcgaacgcacctccagccactcgttgcgcgaagccgaatgcgcccagatcgagaacttcgtcctcggtccgggcgaggagttcctgacgagtcgcccagcgccgttcgaagggactatggagaatcccggtacccgcgcagtagcgctcgacggcctccgcgtagaccttgatctctgcctcaaactcgttcagccccaccccaccgatgtggtagctacccggcttggggtcgggccggtcaagcagtgcgtgcatccccgtgagttccccaccgttcacccgcacgcgggggccgagcgcggggtgcagcgagtagccgacggaagtcaccagcccgcatagcgggctgtaggtgcgccgcctgagccgggctgcggtctcgacggggtcgctatcctggcgaagcttcatcgctcgccccctgccgccagccactcacggatgtcgtagtacaggtccggagcggtttcaacctgcgctggtgcatcaaaacgggacataggtaggacgtcgttgtaggcgatctccatcgtcggtatgtagaccgacaacactttgttgcgcgtcgtgttgaggccgttgcgggcgatgctgacagcctcatgcgcgacgtgcgcggccaagatcgcgcgcaccgacgctgccacggccggcgctccggcccttacgcggtcggcagcggccacccgcatccaggacaggtagctctgccgttcgcgcaggttcatcgcgacccgctgctcgaaggtccggtaggacgaggtcgcaccagggacgacgtagggacccacgtacaaggccggcccgtctacagctgcgtggagccacgacaggtgggcgcgtcgggcgaacaggtcaagggcgcgcagcatagccgggttgttctgcgccagcgctaccacaaggagtggctgcaggtccggcgccgaacccagcaacgccaacatctgggaggcctcctgctccatgtgcaactcgtcggccgactgctcaagccgcaggcctgcgaagagggtggctgatggctgcgtgtcgtcagcgaggacggtagcctgcagcccctctccctcgagaatctgctggatatcgccggcgaggagcgcgtcgtcgctgaatacccacaccgggcgcgtctctctacctccatccatcttgtcctcaacgttttcgaccagcgcaccgatcgatgctaggtgggccatcacgtcgtcaagggccgcgcgggtcaatccgggcacccgggacacgatctcgggcggctgcagtccttggctcaacaagtccaaggccggccacagggtcccggtggcgtcgtcgtcctccagcgttgtgctctcggcgttccagacgcctcgacggaactccaccctgtccatcgagtaaggcaccatcatgaggcccggtgaaatgtggttggtcactttggctcctgtacagcctaggcttggacgcccacggtcatggtgtgggtcgcggtttggaaaatcccgtcgaggttgagtgcctgattgagttcgtcctcgtagaagcttgaggactcgactgaggcaagaccgagccccgtgcagaccaagttgatctgttgtgcgatcgccccgacttcttgaagggcgaacctcaaacccctggctccgtacttccgcatcgccctccacggcgagatgacgaacaccaagtgcactccggccgcatccgattgctccacggccggctcgccggccatcgaattcctcacgccgcgacagccctcttcaccggtcacgggcaccagtcgatcgatgaccggcgagtagcggtagacgccgcgactcaagccggacacccgttgtgcggacatgaagatagacacgggatacagccctccaccagacgggacagcgcgtacattataccgcacgatatcaccgctcgaacgtgggacatccacgtgccccgtcacaccggcagcacctctcagaaacgcagctacgtcacgcaggtctagggattcgccggtgtagttccgtccgctgcgccggcgggcgatcacttgctcgaggggtgcgcgcaccctgctggacctgggaagttcgatcacatcggcagcgaacgtgtcgcgatccatctgtccgtacgtaacgatcatggggtcaacgaaatagtcgccgaccgagacgttgaactccatatccccccgggcgatgcgcgaggcgagcaagaagtctgcagctgcgttagacagccccggcccatcagtgttgtcgcagcggaactcgtgggtccgaaaccccacaccttccgtgcccgggctctgcgctcgatacgacgtgatcgcagaactagccttccttaaaccgcccggagtagctaccatgaccgtcccctctgaggtctcccgaacacttgcgacaatagcagcatgtgggggcagccgccagaggcgggcatccttgtctcgacaaccattgacctccggattcgatatgtgcataatcatagtcgtgccaacacgaaacgtgtacgtctcggaagacgacctagacctgttcgccgaagccaccgagatcgctggaggcctgtccgcagcggtgttggaggccttgcgcagctacgtagacaggcaccatcgcgcggccggcggattcgacgagatcgagctggagctgcagaacgacggtatcgaccaccgtgtcaccttcatgggtcgccgcctgatacacatccgccgtccagatcccgagggaacccgcatagacactgtctacttgaccgccaaacaccaattcgccgttgccaccaaaatccaacgacggctgccagactggacggccggccacgagcacatctggtccgacccggagacctggaatcgggagttctggatcgcaggtgacaagacgatggccgtgtatcccagccttgacaaactccgcgaagctgaccccaatgtggccgaacgcgccgaggccgcggtcaaaatcccgccgttcgaggtcctggacatctgatgacagaatcatcatcttcccggcggcaattggcaatgccggtgctgtcagtcacggatctagccaagaaatacgtggttcatggcggctacgaggtcccggcactcaacggtgtctcgtttgacctgcacccgggagagatgctgggtttgttcgggccaaacggtgctggaaagacgacgctggtcaggatcatcgcgggcctcttatcggcagattctggagacgtccactggggatcggatcaaggtcgggccaggttaggctacgtgtcccaaaagggtggactgcagtacgggctcacgtgccgggaagagatggtcttccacgcacaatgcttcggccagtccgccaagcaggcccggactagcgtcgacgaggtcgccgcgatgctgcactgcgattacctgatggagtgggacgtcggaaggctctccggtgggcaacgccgaatcatcgaggtagggctagcactcgtcaatcaaccatcggtcgtcctgctcgacgagcccaccctgggcctggaccccgcaacacgcctgtcgttgtggcaaacggtaaagtcggcacgccgtgagaccggtgctgccttcctcgtcaccacccactacattgacgaggtggccgagcacctgtccaacgtcagcgtgatcaaccacggaaccgtcgtcgccaacggctcgccagcgcacatccgagaaatgttcgcgaccggggaagtaacgctcggcgtggccgaggatacggtggacagtgcggtggacgtgttggctgggaccgcgttcgaggcgcaccccaccgaaaccgtcccggggatcgtggtcaggtccaggcatcccgacgtggacgcggccaagatcatcaccatcctggctggtcatggcatctcggtggactccatatccgtacgcgaggcgaccttggaagaggcgtttctcacgatcacaggcagtcgagacccggagaggcaaatcccatgaacacttgcttcaggcgatatgcggcgatgtcgctgagagcgcggcgtgatttggccctgacattcatccagcccctcgtctacctagccctcttcggaccgctcttcgtcacgacgatgaagatgtcgcagagagctaccgccgctacgggttactccctatacatcacgggcctgtccatccaaatggccatgacgatcggtgccttcgcggggctaaccatcatcctcgaataccgactcggcatcctcgaacggatctggagcacccccctcacggggagcaagatgatggcggggcgaatcgcgcgcgacgtcgttatgatgatgatgccgatactggtcgtcttcatcatcggcctggtgctgggaacacgccccagcccactgggcctggcgacctacttcgtgacagtgctcggcacaggagccacgttcgccggggtctcctacgcggtggcactcagaacgaagagcgaggcagcgctatccgcgatcttcaacctcatcctgctacccatcctcctgctgtcggggatcatgctgcccatgtcgttcgcaccacactggatcgccaccgctgcccacgtgaacccgttgtggtacctggtgcaaggcgcgcggaaccagttcagcgttctagggctcgtggcggcggccccatggagttgggctgtggccatcgtcatgtcagccgctgccttcggctgggcaagccacgaattcaacaagaggcgctgacacaaagaatggtgccgggaacccaggtccccggcaccaccgagtgcactcgcgacgtcaacgcaccgttgcggtcactgcgcaggtcgagcacgaggacgacgagcccgcgctgctgcaggtcgagccgccaggcgcgagcaggtcgacgttagcgtcggcgccgccgaagacggacgtgacggccggctgagaggtgcggatgcggtgctccagcgaggaggtggtggtgagtttcatgggaggtgctcctaggagtgagacgagaacaaaccctagcgataggttagcagtccgcaaccgactccgggaatagtagaagcgcgcatccgtagcggaagaccttagcctgattacagtgaccctgttcgcgtctcaacattattccacacccccgagcagcgaacgacaccgcgatgatgatccgtcgcctctccaccgaagaactccgcgcccacatcgcaccgggccgccgtcccgtgcatcagacctgccgtcaacgtcggccatgaagctgggaaggtggctctcgtctaggagcagacgcgggacgcctcctccaggttgggccggggaagtgtccggttcttgatgtaggtggcggtccctattgatgggcgttgaccgtgggaatgcggtcggcgaagggggtggcgaacccgttgagcgcaggcttccagcgcatgcatcaacgctgtctgccggccaccggcaagcctcacccgcccgtcatggccatcatcgaggtgccggtgaatcctcgacacatgatcccaactcccccggaggggcttccggggctgttcagccaccagatcagccaggcggcgagcccgactctgccacccggaccctgcagagcgtgcctgctgccgtcgtgtcgtgtcgggccagtgggccaccagatcggccacatccgtcttggcccatct

SEQ ID NO: 114 - DNA, 16491 bp, Propionibacterium acnes
  source 1..16491: mol_type = genomic DNA
gtgttccagtgcctcgcgggcgtgatgttcttcttcggcaccttcttgccacatgcttcgcgcttcagcctcgccatccaagcgaacctggactgtgaacgagtcctcatcgggtccgtcctcattccacgcggcaatgatcccacgggcctcgtctgcgacctgactcaacttcatcgcctgcccgacagccccgagagccggaatctcgaacacccagatattcgcctcagccgagacctcacgatgggcgatcacttcgtaggtcgtctcaccttctactgtcgtgtccattacttccactccttcggaattttcacgcctgctcgctccagctgtgccaggacaccaactgacgtcagctggtgtcctgctggtatcgatacgcgcccggctccgccggggcgtccccagatttcatggcttcccttggcgttccgcagacgggcccatccttgagaacggagcagcttgaggacgtccttagttttctgcggtttcacacatcatagtatagccccacttaacttgtaaactaagcccctgtttacattttagttggtgcatgtgatccctgctcttatgacgtcgcccgacctggcgccttagacatgcactgttcatcctcaaccacactcaccgtcacgggtccgaaggcgaggtctatcaccattcgcatcgatgaagttgaagcaggatcgtccgcatcacgcactgccgatccggacagacgccaccggccgtaccgactgtttacgatctgccaccgcagactgctgccataaccgctatcacctctgatagtacttttagtactatcagaggtgattcaagattctcctgtcgagcagccctacagtcacgaagtcctgcgatcgtcatcgcttaaggcagacggatggccatcggggaccactcgcaaagcaggggcgatcagcaacagtgatgtgccatgagcaagtactggtgcaccggctgtttactccgcccctagataaaccacgggtgcaggggtggacaccacaccatgaccgatgtggtgcccaccccatggctcacaggcaggccctatcgccgggagcactgctgcagatgaggctcagtaacctgccatgtctcacctggggccaaggtgccaagctccccacggaatctcaggcatcggaaaccagcagccgaacttccacagcatgagcgccctacgaaaaagcaggccgccgacggttctcaagaactcgccggcggcctgcatcgccactcgaactgtaaccgtggtccgaccccgtgcacaggtaagctccacactcccaccaggcatggccgaggcagtaccaagttgccgtggcccatcggcagatttggttaaattttgaaaagtcatatagactccttctgtaaatttttaaatctcataggactctcgccatcgccagccagcttcgacaggagtcccgatgtttcaccgagtgaaatatcggcaccgtttgagttgacctaaagctcaaaagatgctagaatccatcttaccccgttaggggcgttttgtcaaacgcccctatattgcgtgtcttcgcgcgtcgtagcgctgatgctgcgcctgtgtcgactatccgtttgtaagtactttcgatgacaccagcagtggctactcatgactggtgcgtgcgggtctaaagcagcagggaaaggaatcgcagtagaagccgcttgattcctatcacccctgatggtactatcagtactaacagagcagggcttactcgatgcgtgagaatcggggacatgctgagcctctcgtaggtcattggcctgctgggcgtcagtgtggcgcggttcgatccagtgaactctatcagctctgttagtactgtcagagttgatatattcgaccccaggaggagcccatgagttacatcgttcgcaccggaaatttggtcgacacccccgagctgcgtgagggagagcatggcccgtacacctacgctcgcgtcatcgtgtccgatcgcattcgccaggaggacggcagctacgtcaacgggccagcgatcgcctacgacgtcttggcgggtggcagccaagccgtgaatctggttgaagccgccaaggcgagcggcaacatccgcatcatgttcgcgggccgttaccgcgtcaccgagtggcggggtgagcagggcactcgtatccagcatgaggtccgagccgacgaagtgagcgtgagcctgctcggtcagagggtgaccgtggagcggcctcgaggtgacgtggcatccaaggagagcacgtcgttctgattgagtccgggggcacggtggtcgccgtggtaaaccgtgcccctgacagtactattgacactattggaggtatcagtgtgactgctcaaattttcgccttgtgcaaccagaagggtggcgtcggaaagtcgacatcgacgtttcatctggcccgtgccgcggtgttgcgtggccagcgtgtgcttgtcgtcgacaacgacccccagggcaacctgacgtctgtcgcggccgccgagcccgtgggggaggatcaggcggggctggccgatgtgctcagcgcgcgtgctccagagaccctccgcgatgtgatcgtgccgggaatctggtctggcctcgatgtcgtgccgacgtctggcatcacgctcggctgggtgcgtgacgaactcgtgatcgccggtgccggccgagaaggccggctgcgggaggccctggccggcgtcgaggacgactacgacgtgatcctgatcgactgtgctccatcgctcgatcagctcacgatcaacggcctggtggccgcccagggtgtcatcgtcgtgacgcactcgaagttgtggagcgccaacggcctcgcccagctgctcgacaccatcgacagcgtgcgcagctactacaacggcgcgctgcgcgtggcgggcatcatcgtcaaccagcacgaggagaacaccatcagcgggaaaacctggctcgacgagctgcatcaggctgccgagtcccggaagctgaccgtgcttgacccgccgatccccaagcgtgtcgtcatcgccgataccgtcgaggccgcgcgcggtctcgacgagtggggaagtgccgaggcggccgcgctcggccagttgtacgcccaccacctgacctgcatcgaaggagccctgtgatgacccgtccagccccccgaaagtcctcattgagcggatcaactccggtcgccccgccggctcagacggcgccggcaccgtctgccgcacctaccccccacaaggccgatgagtcacagacgagcagcaccacgaggaagtggcggcacaaggtgtcgttctaccaggacccggccgacaccgaccgggtgcgcggggcgatcctttacacgatgacgaccgagggcaaccggaacctgagccagttcgtcaacgatgccgtcatggccaaggtggtcgagctggaagtcaagtacaacgatggccagccattccccgctgtgggagcccgaggactaccccagggcggtgcagccgccgccggtgagtagaggaccatcgaccgtcgggggcttcaccatgcccccgaccctcggtcatcctgatcctcttgtcgatggtggtgacagtgggggattcacgcctcgttcagatcagaggaagtctcaccgcgtgattagtactatcaaatctgacagtactaacagagcagatagggttccctaggtcgagctgtatcacgccgacaaccagtgagccagtgatctacgaggggcgcaatatgcacccgatcggtagccgcgaaggcctcgccctgccccgatagtactatcaccactatcaatggtgctagtggtgagtttcttccattgatgacaacagcacagtgctgccgtctgtgtgcgggccaccagcccgcacacagttgccgtcgaggacgttgttcatgctctgtggtggccggtcctgagggcggctcgcaggatctcccggcgctcacggcgacgagcctggtagccaaggtctgcatgttcggcggcgagacgggctttgagggttgcggcttctgcacggcggtggagttggtcgtcgatgagttgggcgcgggccagacgccgcttatgggggttgtcgtgggtgaggggggcgtcgaggctgccgtcgtgggttagggccagggctgctcgttcggcgtcgtcgaggccgatgtggtggacggtcacgggtgcggtggtgacgtcgaggatgtccaggtggatgttgtggccgccgccgggggcttcggggaagtctggtgggctggcctggccggtgtcggggtcataccaggacaggccgatgatctcggcccagggtgggggcgggcagacggctcgcagaagggtgtgggccaggaacgtgttgcgggccatgatgcctccaagggtgaaaagcagtcgagtagcgatgacggcggggtagccgtctgctgggctgaggccgaccgggcccatgtcctcgatgctcttgtgctgcggccataccccaaagctaccaaacagtctttttaatctcaaagatacaaacagtgcttgacatattatctgcagcgaaagatactttcatcatggtggctgatcatgattacgcgactcctgacgatgagtggatgacacctcctcaggtggcccgtgtgattccgaacaccactgctcaggctgtccggcgctgggctgaggagggtcagcttcctggggcgtttcgtactccttctgggcgttggcatattccgtggtcggctgtggtgggcatcatggggtttgatccgcgtgagtccgcatcaccgagtgatcgtcaccagagctgacagagtcgtcgatgagctttcgagtgcagagctgatggcacgacggtctggatacttgtggagatgagagacgaccacatccagtcatggtcggggtacaccgaggggcagattcagcagtgctggcacgatgaggttgcccctgccattgactcgctcatggagcaggtaaggtctgttgccgagactcctgtgccgccgggttcgagattttacggcgatgagcagtgggccaagccttttcatccgtctactgcgatctgcggttcaatgggtccgccagcgatcacttgcacgcgctgaagctcctcgtctgggaagcgaacgtccaccatgtctatgcgccgtacacccttgctcgtgcatctattgaggcatcgtctactgctgtgtggctgttgagcacgaagacgcgcggagaacgtgtgctgcgagccttgcgatggtacgcgcaggattgtcacgactcgtgcaggttcatggatgatgagcagtatcgtgaccacctattgcggcgcattgaggggactgtcgctgcgggaaatctcgactcgcgcgctgctaggaaacggtaccgtgcaaccgatgttgtcgatgaggctgatcagctggttcccggaactctgagggcgtggcgagctttttctggtatggcccattcccgtatgtgggcatccagggggctgctcgacatggaagtgctgtccagtggccaaggaatggttacggcgaaggtgacgagcggatcggcccaaatcctttgggccgtcgtggcagctctgaatgttgctctcagtgccgctcgcttgtggcgtgattcgatgtgctcaccgtttgctgttgcccagtcggtagacgcgatgccagaggcgtttcgccgccctgtttagggtctgatcggggtagtgggtgttcacggggtcccaggttggccatggggcggcttggtgatgtgagttgggttgtgtggcagcctgggtgttgggtgtggcttcgttggccacgaaggcatgctcttccttgtgctgggacttgagtccccagtgctctcccctttgctagtggggggtggggtccccggaggtaggtcctccggggactttttctatgtctgtccgtgccccaggatttcgtatctaggcagtaccaattttgggttagttggaggtttctttggtaatggacagggtgagggtgatgaagaggtggccgtccttggtggcagaaattttctcgaacttcagctgaatgttgttatcagccactatctgttgggcggtgaggtgctcggagagcttctggaatccttcgcggatccacaggttgtaggggttggtgaccgagaccgaagggtatgggtcgaccttcagcgtcaggactggctggtctgggttgagggagttgatcttcaccagtttggggtaccggtcgcactcatgtgtctcttgtgttgggggccagcagtcgggggcccattcctcccagtggtcacgcatctcacgaagtactttcctgcatctcagcctctgcaggagctcgcgcgccaccgatgggagggctgccatgatgagggcaaggactgcgaacccgatgatgtaattgaccgtgtccctcgtcacgccgttcttgccgaggattccgatggcgaacgcgatgacgacaccgcccaggcacaggtgcatggggtcatgctgtgatggtttttcttcttcagcgactggtggggctatagtcatgtgtgccccttagtactaagtgatactggtgggttgcttttccccggtggccgtgtgcaagacggccaccggggttttccttcatgttcctgattttatctgcccggtgtggcgttttcatctttgtgtgggtggttcgcctggggtcttggagtgtggtgacgcggtgatggtcacggtgacggtgactgtggcgcgtggcgggtgaggtggttctttcctggtctggtgtgtggcccaggtgagtgtggtgatgagggccagggtgaggatgatgaccagggtggggagtagtttgtctggccggtgtcgccgggcttggtggcgcggcatgtttttccagggtgtgtctccgaacaggtcgtcgtcggaggggtcgtcgtggttcatagggtggccttggcgatggtggtgggcgagtttggtccaggtgatggtgccgtcggaggcgatgtggcggtcggcgggcagggtgtggacggtccatccggcgtcggtgagggcggtggtgaaggatttcttgatggatcgtttgggtaggtcgatgggggcgtgggtgccgacccagatgcaccggtttttgaggtgggtggcgccgaggtggttcatgtcgcggaccatgttttgggtgagtgtgagggtgtcggggtcccattggacggggatgatgatgtggtctgcgatggtgatggcgtgttgccaggcggcgtcgaggtcgttgtttccggtgtcgaggatgatgacgtggaagcggcttcttagggcggtgatgatgcggtcgaggtcgtcggcggtggggggtgtgatgaggctgttgtggttgtcggtgatggtgggtaggcatgtgatggtggcccagccttctggttgccaggagatgtaggggtcgaggtcgcggggttgggaggcgaatcctgggtgacgggctgcgcgggcgaggtcgatgacggtgttgtcggtgtggcggggtgcgcgggtggagagggtgccgcgtgggttgatttccacgacgacgatgtcgtcgtgtcctgctgtggtggcgagggcttgggcaaggatgacggccagcggggttttgccggtgccgcctttgaggttggcgagggtgatgatgtggtcggtgagttgggcgggtgcggcggtgtggtgagggttggcggtgaggttggcgatggtgaacagggcatcgagatcgtcggtggtgttctgctcggtgggttgggggtcgccggagatgatcgggtcggcgcggcgcggctgccatgccggcctcaccactgtcacgaccaccacgggtctgctggcgctgtgtgggtgtcgtcggcgatgactcacgatcggcagtctcaccatcgtctcggtgatgctcggctagcgctggacccggtcaagttcgggccggctcacccagtggtgatgactcggtcacagaaccgctgccggtcgttatctcggacgtctcgactcctccagtcctgatgggcgttggagccacctacacctactctcagaacgaccccgacctcgtgtggggcgggggcagatgtcacttgggccaatcgagagcccaggtgatggggaaagcagggtgtgatatctgtcctggaaaactgggcagctgctaccgtggattgacggatctccacgaaagaagggaatgcgaccatgcagatcaccgtcaagaccatcaaagatcatcgggttcgcactgtccagaccgccatgagcagcgccttggggattggttcccaggtagacatgctcgcccccggcggttccaccagctcgagttccggttcatgctgctcgtgctcgacctgcgcggtagtggcgcagcctcaagactgaacggctggtcagccccaggggcgtggcgctcatcgcgtcacgccccttctattcgctggacagggtgcgcgagctgaggaacatcgcggtgtgtgcgatgacgaggggcaggagcaagtctgtgcgggttgccaagtagccctgcgcgatggccatcacgctggccccgacggcggcgaagacacctccgatacgtcgcttcatgccgccgaattgcatcaggacgaataggactcccgcggtccacatccctccgggcatgcatctgggaaagatgaaccggaagatgatctcttcacaggagagctggagtactagcagcgtagcccccacggggagactcacctctactgacagacggatcgtcttcatccacccacccgagctggcatcgaccatttcggtggccatgcgcgaccggtggcctcgtgcctctcgctgcgtgtcgatccagccgagcagtccgtggacgctctccgctaggactcctgacgcgacagtctcaccaattcctaagcccacggcgaggaccgcgacgcccccctgcacggcaggctgtgtgacttggtggtcccaccaacccgccggcaggaccatgcgtgcgaggctgcacacgagcaggaggtggagggtcacgacgagcgacatctggaataccgcttgccgttcggcgatggtggcgttgggaaagagcggtaggccggcacgggcagcggcgctcgacagcttccgcaagagcggtttggagacgaagtagtaggcgacgtacagcgccagcgctgtcgcgatgatgatcatcggtctgccaccgagctgacccgccgatagccgtttctgttccaccaatactggctgttgtagatcaggtggcccagaacacaggcccagatcccccagaagatgaacaggatagtccccaaggcggcgagcgggatcttggagaggacctgtccccgtccgaacaccgagtggccgcaagcaaacaagagtgctcccacagcggtgagcgcgagccaggccggggttgctcgcagactgatcaccgggaccccgacccggaagccgacctcttctcctacagcgatgactagcaactgccacagcggcatgttctgaacggagcgcgcgactcgggctcgagtcacccacacgggctgttgagcgctcacatcaccactcaggtaccccggtgaggcacttcgcttagtactggggcccgatgtgcgagcattcgtgatgtgtcgcaggatccggttgtcaagccaagaggccagcagggctccggcgacagtgacgggtagcccgatcagcacgaggccccagccatgcggtgccgagaggtttctggccggcgtgcacgcgaggcaggcaagtgccaacactgccagcactacgacgtagatggtcgcataattcgacttgcgggtgacgttgccgaccatcttggccaaagtcgctggggaccagctgatgagtgcgatggtggtcagcaggaagcaggaccagacagacatccggcgcactcaggggtatgggtgcggctgtgggttttggaaaccgccatatgcggcgtagcgggggtgtgcccgcatgggtgcgctgggcagtgacagggcgagcagcccaggcgcccagagcctgacacagtgcagtcccagcccctggatctctatggtggtgaaatcttcgatgtacaggggtgacacacaggtgatgctgttgaccacgctctttaccagttccgcccccgtgtgggtgtcgtcaggtggcaggtcttcggcttgggcaatggtgcccgcgtcgaatttcgccacaactgattgcgcggcctgatagttcctcgcgtagtaggagacgttcgagtcgaggtcaagcatgtcctccgtggacatactggacgcgtcggcctcggcgtcgaaagacgtccataccgcgagcatccgaaccccgctgcactcgagaaacgccttgtacatggctgcttccagacccgcgtctgcacctaggccgacggcgacgaggggaagttggttgccactaccgaccatcatgcatgccacggtgaaatgcttgagcccgggagtcggaagccagtagaaacgcagttcgtggcttcggcccgctgcacgttccacgagccgctggatgcgctggaggcggggtccttcgacgcggatgcgcacaggtgacgaggctccataccacaggcccatcgcggcatctacctggatcaattcataagccgcggacagcgttgcggcgacgcgtgaagtgtggacggcggtgccggtcgtcacggccgttcccagccacggctcaccgtcgtgccgacgggggttgtaacccaggtaaaagaactgcgccgggatccactcctgccgggaggtcccgacacggggagtcttgacccatgtcatgggcaagtcgtcgcgataggtgtcgaacgcacctccagccactcgttgcgcgaagccgaatgcgcccagatcgagaacttcgtcctcggtccgggcgaggagttcctgacgagtcgcccagcgccgttcgaagggactatggagaatcccggtacccgcgcagtagcgctcgacggcctccgcgtagaccttgatctctgcctcaaactcgttcagccccaccccaccgatgtggtagctacccggcttggggtcgggccggtcaagcagtgcgtgcatccccgtgagttccccaccgttcacccgcacgcgggggccgagcgcggggtgcagcgagtagccgacggaagtcaccagcccgcatagcgggctgtaggtgcgccgcctgagccgggctgcggtctcgacggggtcgctatcctggcgaagcttcatcgctcgccccctgccgccagccactcacggatgtcgtagtacaggtccggagcggtttcaacctgcgctggtgcatcaaaacgggacataggtaggacgtcgttgtaggcgatctccatcgtcggtatgtagaccgacaacactttgttgcgcgtcgtgttgaggccgttgcgggcgatgctgacagcctcatgcgcgacgtgcgcggccaagatcgcgcgcaccgacgctgccacggccggcgctccggcccttacgcggtcggcagcggccacccgcatccaggacaggtagctctgccgttcgcgcaggttcatcgcgacccgctgctcgaaggtccggtaggacgaggtcgcaccagggacgacgtagggacccacgtacaaggccggcccgtctacagctgcgtggagccacgacaggtgggcgcgtcgggcgaacaggtcaagggcgcgcagcatagccgggttgttctgcgccagcgctaccacaaggagtggctgcaggtccggcgccgaacccagcaacgccaacatctgggaggcctcctgctccatgtgcaactcgtcggccgactgctcaagccgcaggcctgcgaagagggtggctgatggctgcgtgtcgtcagcgaggacggtagcctgcagcccctctccctcgagaatctgctggatatcgccggcgaggagcgcgtcgtcgctgaatacccacaccgggcgcgtctctctacctccatccatcttgtcctcaacgttttcgaccagcgcaccgatcgatgctaggtgggccatcacgtcgtcaagggccgcgcgggtcaatccgggcacccgggacacgatctcgggcggctgcagtccttggctcaacaagtccaaggccggccacagggtcccggtggcgtcgtcgtcctccagcgttgtgctctcggcgttccagacgcctcgacggaactccaccctgtccatcgagtaaggcaccatcatgaggcccggtgaaatgtggttggtcactttggctcctgtacagcctaggcttggacgcccacggtcatggtgtgggtcgcggtttggaaaatcccgtcgaggttgagtgcctgattgagttcgtcctcgtagaagcttgaggactcgactgaggcaagaccgagccccgtgcagaccaagttgatctgttgtgcgatcgccccgacttcttgaagggcgaacctcaaacccctggctccgtacttccgcatcgccctccacggcgagatgacgaacaccaagtgcactccggccgcatccgattgctccacggccggctcgccggccatcgaattcctcacgccgcgacagccctcttcaccggtcacgggcaccagtcgatcgatgaccggcgagtagcggtagacgccgcgactcaagccggacacccgttgtgcggacatgaagatagacacgggatacagccctccaccagacgggacagcgcgtacattataccgcacgatatcaccgctcgaacgtgggacatccacgtgccccgtcacaccggcagcacctctcagaaacgcagctacgtcacgcaggtctagggattcgccggtgtagttccgtccgctgcgccggcgggcgatcacttgctcgaggggtgcgcgcaccctgctggacctgggaagttcgatcacatcggcagcgaacgtgtcgcgatccatctgtccgtacgtaacgatcatggggtcaacgaaatagtcgccgaccgagacgttgaactccatatccccccgggcgatgcgcgaggcgagcaagaagtctgcagctgcgttagacagccccggcccatcagtgttgtcgcagcggaactcgtgggtccgaaaccccacaccttccgtgcccgggctctgcgctcgatacgacgtgatcgcagaactagccttccttaaaccgcccggagtagctaccatgaccgtcccctctgaggtctcccgaacacttgcgacaatagcagcatgtgggggcagccgccagaggcgggcatccttgtctcgacaaccattgacctccggattcgatatgtgcataatcatagtcgtgccaacacgaaacgtgtacgtctcggaagacgacctagacctgttcgccgaagccaccgagatcgctggaggcctgtccgcagcggtgttggaggccttgcgcagctacgtagacaggcaccatcgcgcggccggcggattcgacgagatcgagctggagctgcagaacgacggtatcgaccaccgtgtcaccttcatgggtcgccgcctgatacacatccgccgtccagatcccgagggaacccgcatagacactgtctacttgaccgccaaacaccaattcgccgttgccaccaaaatccaacgacggctgccagactggacgaccggccacgagcacatctggtccgacccggagacctggaatcgggagttctggatcgcaggtgacaagacgatggccgtgtatcccagccttgacaaactccgcgaagctgaccccaatgtggccgaacgcgccgaggccgcggtcaaaatcccgccgttcgaggtcctggacatctgatgacagaatcatcatcttcccggcggcaattggcaatgccggtgctgtcagtcacggatctagccaagaaatacgtggttcatggcggctacgaggtcccggcactcaacggtgtctcgtttgacctgcacccgggagagatgctgggtttgttcgggccaaacggtgctggaaagacgacgctggtcaggatcatcgcgggcctcttatcggcagattctggagacgtccactggggatcggatcaaggtcgggccaggttaggctacgtgtcccaaaagggtggactgcagtacgggctcacgtgccgggaagagatggtcttccacgcacaatgcttcggccagtccgccaagcaggcccggactagcgtcgacgaggtcgccgcgatgctgcactgcgattacctgatggagtgggacgtcggaaggctctccggtgggcaacgccgaatcatcgaggtagggctagcactcgtcaatcaaccatcggtcgtcctgctcgacgagcccaccctgggcctggaccccgcaacacgcctgtcgttgtggcaaacggtaaagtcggcacgccgtgagaccggtgctgccttcctcgtcaccacccactacattgacgaggtggccgagcacctgtccaacgtcagcgtgatcaaccacggaaccgtcgtcgccaacggctcgccagcgcacatccgagaaatgttcgcgaccggggaagtaacgctcggcgtggccgaggatacggtggacagtgcggtggacgtgttggctgggaccgcgttcgaggcgcaccccaccgaaaccgtcccggggatcgtggtcaggtccaggcatcccgacgtggacgcggccaagatcatcaccatcctggctggtcatggcatctcggtggactccatatccgtacgcgaggcgaccttggaagaggcgtttctcacgatcacaggcagtcgagacccggagaggcaaatcccatgaacacttgcttcaggcgatatgcggcgatgtcgctgagagcgcggcgtgatttggccctgacattcatccagcccctcgtctacctagccctcttcggaccgctcttcgtcacgacgatgaagatgtcgcagagagctaccgccgctacgggttactccctatacatcacgggcctgtccatccaaatggccatgacgatcggtgccttcgcggggctaaccatcatcctcgaataccgactcggcatcctcgaacggatctggagcacccccctcacggggagcaagatgatggcggggcgaatcgcgcgcgacgtcgttatgatgatgatgccgatactggtcgtcttcatcatcggcctggtgctgggaacacgccccagcccactgggcctggcgacctacttcgtgacagtgctcggcacaggagccacgttcgccggggtctcctacgcggtggcactcagaacgaagagcgaggcagcgctatccgcgatcttcaacctcatcctgctacccatcctcctgctgtcggggatcatgctgcccatgtcgttcgcaccacactggatcgccaccgctgcccacgtgaacccgttgtggtacctggtgcaaggcgcgcggaaccagttcagcgttctagggctcgtggcggcggccccatggagttgggctgtggccatcgtcatgtcagccgctgccttcggctgggcaagccacgaattcaacaagaggcgctgacacaaagaatggtgccgggaacccaggtccccggcaccaccgagtgcactcgcgacgtcaacgcaccgttgcggtcactgcgcaggtcgagcacgaggacgacgagcccgcgctgctgcaggtcgagccgccaggcgcgagcaggtcgacgttagcgtcggcgccgccgaagacggacgtgacggccggctgagaggtgcggatgcggtgctccagcgaggaggtggtggtgagtttcatgggaggtgctcctaggagtgagacgagaacaaaccctagcgataggttagcagtccgcaaccgactccgggaatagtagaagcgcgcatccgtagcggaagaccttagcctgattacagtgaccctgttcgcgtctcaacattattccacacccccgagcagcgaacgacaccgcgatgatgatccgtcgcctctccaccgaagaactccgcgcccacatcgcaccgggccgccgtcccgtgcatcagacctgccgtcaacgtcggccatgaagctgggaaggtggctctcgtctaggagcagacgcgggacgcctcctccaggttgggccggggaagtgtccggttcttgatgtaggtggcggtccctattgatgggcgttgaccgtgggaatgcggtcggcgaagggggtggcgaacccgttgagcgcaggcttccagcgcatgcatcaacgctgtctgccggccaccggcaagcctcacccgcccgtcatggccatcatcgaggtgccggtgaatcctcgacacatgatcccaactcccccggaggggcttccggggctgttcagccaccagatcagccaggcggcgagcccgactctgccacccggaccctgcagagcgtgcctgctgccgtcgtgtcgtgtcgggccagtgggccaccagatcggccacatccgtcttggcccat

SEQ ID NO: 115 - DNA, 13424 bp, Propionibacterium acnes
  source 1..13424: mol_type = genomic DNA
ccgcgcggggtctcgacgagtggggaagtgccgaggcggccgcgctcggccagttgtacgcccaccacctgacctgcatcgaaggagccctgtgatgacccgtccagccccccgaaagtcctcattgagcggatcaactccggtcgccccgccggctcagacggcgccggcaccgtctgccgcacctaccccccacaaggccgatgagtcacagacgagcagcaccacgaggaagtggcggcacaaggtgtcgttctaccaggacccggccgacaccgaccgggtgcgcggggcgatcctttacacgatgacgaccgagggcaaccggaacctgagccagttcgtcaacgatgccgtcatggccaaggtggtcgagctggaagtcaagtacaacgatggccagccattccccgctgtgggagcccgaggactaccccagggcggtgcagccgccgccggtgagtagaggaccatcgaccgtcgggggcttcaccatgcccccgaccctcggtcatcctgatcctcttgtcgatggtggtgacagtgggggattcacgcctcgttcagatcagaggaagtctcaccgcgtgattagtactatcaaatctgacagtactaacagagcagatagggttccctaggtcgagctgtatcacgccgacaaccagtgagccagtgatctacgaggggcgcaatatgcacccgatcggtagccgcgaaggcctcgccctgccccgatagtactatcaccactatcaatggtgctagtggtgagtttcttccattgatgacaacagcacagtgctgccgtctgtgtgcgggccaccagcccgcacacagttgccgtcgaggacgttgttcatgctctgtggtggccggtcctgagggcggctcgcaggatctcccggcgctcacggcgacgagcctggtagccaaggtctgcatgttcggcggcgagacgggctttgagggttgcggcttctgcacggcggtggagttggtcgtcgatgagttgggcgcgggccagacgccgcttatgggggttgtcgtgggtgaggggggcgtcgaggctgccgtcgtgggttagggccagggctgctcgttcggcgtcgtcgaggccgatgtggtggacggtcacgggtgcggtggtgacgtcgaggatgtccaggtggatgttgtggccgccgccgggggcttcggggaagtctggtgggctggcctggccggtgtcggggtcataccaggacaggccgatgatctcggcccagggtgggggcgggcagacggctcgcagaagggtgtgggccaggaacgtgttgcgggccatgatgcctccaagggtgaaaagcagtcgagtagcgatgacggcggggtagccgtctgctgggctgaggccgaccgggcccatgtcctcgatgctcttgtgctgcggccataccccaaagctaccaaacagtctttttaatctcaaagatacaaacagtgcttgacatattatctgcagcgaaagatactttcatcatggtggctgatcatgattacgcgactcctgacgatgagtggatgacacctcctcaggtggcccgtgtgattccgaacaccactgctcaggctgtccggcgctgggctgaggagggtcagcttcctggggcgtttcgtactccttctgggcgttggcatattccgtggtcggctgtggtgggcatcatggggtttgatccgcgtgagtccgcatcaccgagtgatcgtcaccagagctgacagagtcgtcgatgagctttcgagtgcagagctgatggcacgacggtctggatacttgtggagatgagagacgaccacatccagtcatggtcggggtacaccgaggggcagattcagcagtgctggcacgatgaggttgcccctgccattgactcgctcatggagcaggtaaggtctgttgccgagactcctgtgccgccgggttcgagattttacggcgatgagcagtgggccaagccttttcatccgtctactgcgatctgcggttcaatgggtccgccagcgatcacttgcacgcgctgaagctcctcgtctgggaagcgaacgtccaccatgtctatgcgccgtacacccttgctcgtgcatctattgaggcatcgtctactgctgtgtggctgttgagcacgaagacgcgcggagaacgtgtgctgcgagccttgcgatggtacgcgcaggattgtcacgactcgtgcaggttcatggatgatgagcagtatcgtgaccacctattgcggcgcattgaggggactgtcgctgcgggaaatctcgactcgcgcgctgctaggaaacggtaccgtgcaaccgatgttgtcgatgaggctgatcagctggttcccggaactctgagggcgtggcgagctttttctggtatggcccattcccgtatgtgggcatccagggggctgctcgacatggaagtgctgtccagtggccaaggaatggttacggcgaaggtgacgagcggatcggcccaaatcctttgggccgtcgtggcagctctgaatgttgctctcagtgccgctcgcttgtggcgtgattcgatgtgctcaccgtttgctgttgcccagtcggtagacgcgatgccagaggcgtttcgccgccctgtttagggtctgatcggggtagtgggtgttcacggggtcccaggttggccatggggcggcttggtgatgtgagttgggttgtgtggcagcctgggtgttgggtgtggcttcgttggccacgaaggcatgctcttccttgtgctgggacttgagtccccagtgctctcccctttgctagtggggggtggggtccccggaggtaggtcctccggggactttttctatgtctgtccgtgccccaggatttcgtatctaggcagtaccaattttgggttagttggaggtttctttggtaatggacagggtgagggtgatgaagaggtggccgtccttggtggcagaaattttctcgaacttcagctgaatgttgttatcagccactatctgttgggcggtgaggtgctcggagagcttctggaatccttcgcggatccacaggttgtaggggttggtgaccgagaccgaagggtatgggtcgaccttcagcgtcaggactggctggtctgggttgagggagttgatcttcaccagtttggggtaccggtcgcactcatgtgtctcttgtgttgggggccagcagtcgggggcccattcctcccagtggtcacgcatctcacgaagtactttcctgcatctcagcctctgcaggagctcgcgcgccaccgatgggagggctgccatgatgagggcaaggactgcgaacccgatgatgtaattgaccgtgtccctcgtcacgccgttcttgccgaggattccgatggcgaacgcgatgacgacaccgcccaggcacaggtgcatggggtcatgctgtgatggtttttcttcttcagcgactggtggggctatagtcatgtgtgccccttagtactaagtgatactggtgggttgcttttccccggtggccgtgtgcaagacggccaccggggttttccttcatgttcctgattttatctgcccggtgtggcgttttcatctttgtgtgggtggttcgcctggggtcttggagtgtggtgacgcggtgatggtcacggtgacggtgactgtggcgcgtggcgggtgaggtggttctttcctggtctggtgtgtggcccaggtgagtgtggtgatgagggccagggtgaggatgatgaccagggtggggagtagtttgtctggccggtgtcgccgggcttggtggcgcggcatgtttttccagggtgtgtctccgaacaggtcgtcgtcggaggggtcgtcgtggttcatagggtggccttggcgatggtggtgggcgagtttggtccaggtgatggtgccgtcggaggcgatgtggcggtcggcgggcagggtgtggacggtccatccggcgtcggtgagggcggtggtgaaggatttcttgatggatcgtttgggtaggtcgatgggggcgtgggtgccgacccagatgcaccggtttttgaggtgggtggcgccgaggtggttcatgtcgcggaccatgttttgggtgagtgtgagggtgtcggggtcccattggacggggatgatgatgtggtctgcgatggtgatggcgtgttgccaggcggcgtcgaggtcgttgtttccggtgtcgaggatgatgacgtggaagcggcttcttagggcggtgatgatgcggtcgaggtcgtcggcggtggggggtgtgatgaggctgttgtggttgtcggtgatggtgggtaggcatgtgatggtggcccagccttctggttgccaggagatgtaggggccgaggtcgcggggttgggaggcgaatcctgggtgacgggctgcgcgggcgaggtcgatgacggtgttgtcggtgtggcggggtgcgcgggtggagagggtgccgcgtgggttgatttccacgacgacgatgtcgtcgtgtcctgctgtggtggcgagggcttgggcaaggatgacggccagcggggttttgccggtgccgcctttgaggttggcgagggtgatgatgtggtcggtgagttgggcgggtgcggcggtgtggtgagggttggcggtgaggttggcgatggtgaacagggcatcgagatcgtcggtggtgttctgctcggtgggttgggggtcgccggagatgatcgggtcggcgcggcgcggctgccatgccggcctcaccactgtcacgaccaccacgggtctgctggcgctgtgtgggtgtcgtcggcgatgactcacgatcggcagtctcaccatcgtctcggtgatgctcggctagcgctggacccggtcaagttcgggccggctcacccagtggtgatgactcggtcacagaaccgctgccggtcgttatctcggacgtctcgactcctccagtcctgatgggcgttggagccacctacacctactctcagaacgaccccgacctcgtgtggggcgggggcagatgtcacttgggccaatcgagagcccaggtgatggggaaagcaggggtgtgatatctgtcctggaaaactgggcagctgctaccgtggattgacggatctccacgaaagaagggaatgcgaccatgcagatcaccgtcaagaccatcaaagatcatcgggttcgcactgtccagaccgccatgagcagcgccttggggattggttcccaggtagacatgctcgcccccggcggttccaccagctcgagttccggttcatgctgctcgtgctcgacctgcgcggtagtggcgcagcctcaagactgaacggctggtcagccccaggggcgtggcgctcatcgcgtcacgccccttctattcgctggacagggtgcgcgagctgaggaacatcgcggtgtgtgcgatgacgaggggcaggagcaagtctgtgcgggttgccaagtagccctgcgcgatggccatcacgctggccccgacggcggcgaagacacctccgatacgtcgcttcatgccgccgaattgcatcaggacgaataggactcccgcggtccacatccctccgggcatgcatctgggaaagatgaaccggaagatgatctcttcacaggagagctggagtactagcagcgtagcccccacggggagactcacctctactgacagacggatcgtcttcatccacccacccgagctggcatcgaccatttcggtggccatgcgcgaccggtggcctcgtgcctctcgctgcgtgtcgatccagccgagcagtccgtggacgctctccgctaggactcctgacgcgacagtctcaccaattcctaagcccacggcgaggaccgcgacgcccccctgcacggcaggctgtgtgacttggtggtcccaccaacccgccggcaggaccatgcgtgcgaggctgcacacgagcaggaggtggagggtcacgacgagcgacatctggaataccgcttgccgttcggcgatggtggcgttgggaaagagcggtaggccggcacgggcagcggcgctcgacagcttccgcaagagcggtttggagacgaagtagtaggcgacgtacagcgccagcgctgtcgcgatgatgatcatcggtctgccaccgagctgacccgccgatagccgtttctgttccaccaatactggctgttgtagatcaggtggcccagaacacaggcccagatcccccagaagatgaacaggatagtccccaaggcggcgagcgggatcttggagaggacctgtccccgtccgaacaccgagtggccgcaagcaaacaagagtgctcccacagcggtgagcgcgagccaggccggggttgctcgcagactgatcaccgggaccccgacccggaagccgacctcttctcctacagcgatgactagcaactgccacagcggcatgttctgaacggagcgcgcgactcgggctcgagtcacccacacgggctgttgagcgctcacatcaccactcaggtaccccggtgaggcacttcgcttagtactggggcccgatgtgcgagcattcgtgatgtgtcgcaggatccggttgtcaagccaagaggccagcagggctccggcgacagtgacgggtagcccgatcagcacgaggccccagccatgcggtgccgagaggtttctggccggcgtgcacgcgaggcaggcaaatgccatcactgccagcactacgacgtagatggtcgcataattcgacttgcgggtgacgttgccgaccatcttggccaaagtcgctggggaccagctgatgagtgcgatggtggtcagcaggaagcaggaccagacagacatccggcgcactcaggggtatgggtgcggctgtgggttttggaaaccgccatatgcggcgtagcgggggtgtgcccgcatgggtgcgctgggcagtgacagggcgagcagcccaggcgcccagagcctgacacagtgcagtcccagcccctggatctctatggtggtgaaatcttcgatgtacaggggtgacacacaggtgatgctgttgaccacgctctttaccagttccgcccccgtgtgggtgtcgtcaggtggcaggtcttcggcttgggcaatggtgcccgcgtcgaatttcgccacaactgattgcgcggcctgatagttcctcgcgtagtaggagacgttcgagtcgaggtcaagcatgtcctccgtggacatactggacgcgtcggcctcggcgtcgaaagacgtccataccgcgagcatccgaaccccgctgcactcgagaaacgccttgtacatggctgcttccagacccgcgtctgcacctaggccgacggcgacgaggggaagttggttgccactaccgaccatcatgcatgccacggtgaaatgcttgagcccgggagtcggaagccagtagaaacgcagttcgtggcttcggcccgctgcacgttccacgagccgctggatgcgctggaggcggggtccttcgacgcggatgcgcacaggtgacgaggctccataccacaggcccatcgcggcatctacctggatcaattcataagccgcggacagcgttgcggcgacgcgtgaagtgtggacggcggtgccggtcgtcacggccgttcccagccacggctcaccgtcgtgccgacgggggttgtaacccaggtaaaagaactgcgccgggatccactcctgccgggaggtcccgacacggggagtcttgacccatgtcatgggcaagtcgtcgcgataggtgtcgaacgcacctccagccactcgttgcgcgaagccgaatgcgcccagatcgagaacttcgtcctcggtccgggcgaggagttcctgacgagtcgcccagcgccgttcgaagggactatggagaatcccggtacccgcgcagtagcgctcgacggcctccgcgtagaccttgatctctgcctcaaactcgttcagccccaccccaccgatgtggtagctacccggcttggggtcgggccggtcaagcagtgcgtgcatccccgtgagttccccaccgttcacccgcacgcgggggccgagcgcggggtgcagcgagtagccgacggaagtcaccagcccgcatagcgggctgtaggtgcgccgcctgagccgggctgcggtctcgacggggtcgctatcctggcgaagcttcatcgctcgccccctgccgccagccactcacggatgtcgtagtacaggtccggagcggtttcaacctgcgctggtgcatcaaaacgggacataggtaggacgtcgttgtaggcgatctccatcgtcggtatgtagaccgacaacactttgttgcgcgtcgtgttgaggccgttgcgggcgatgctgacagcctcatgcgcgacgtgcgcggccaagatcgcgcgcaccgacgctgccacggccggcgctccggcccttacgcggtcggcagcggccacccgcatccaggacaggtagctctgccgttcgcgcaggttcatcgcgacccgctgctcgaaggtccggtaggacgaggtcgcaccagggacgacgtagggacccacgtacaaggccggcccgtctacagctgcgtggagccacgacaggtgggcgcgtcgggcgaacaggtcaagggcgcgcagcatagccgggttgttctgcgccagcgctaccacaaggagtggctgcaggtccggcgccgaacccagcaacgccaacatctgggaggcctcctgctccatgtgcaactcgtcggccgactgctcaagccgcaggcctgcgaagagggtggctgatggctgcgtgtcgtcagcgaggacggtagcctgcagcccctctccctcgagaatctgctggatatcgccggcgaggagcgcgtcgtcgctgaatacccacaccgggcgcgtctctctacctccatccatcttgtcctcaacgttttcgaccagcgcaccgatcgatgctaggtgggccatcacgtcgtcaagggccgcgcgggtcaatccgggcacccgggacacgatctcgggcggctgcagtccttggctcaacaagtccaaggccggccacagggtcccggtggcgtcgtcgtcctccagcgttgtgctctcggcgttccagacgcctcgacggaactccaccctgtccatcgagtaaggcaccatcatgaggcccggtgaaatgtggttggtcactttggctcctgtacagcctaggcttggacgcccacggtcatggtgtgggtcgcggtttggaaaatcccgtcgaggttgagtgcctgattgagttcgtcctcgtagaagcttgaggactcgactgaggcaagaccgagccccgtgcagaccaagttgatctgttgtgcgatcgccccgacttcttgaagggcgaacctcaaacccctggctccgtacttccgcatcgccctccacggcgagatgacgaacaccaagtgcactccggccgcatccgattgctccacggccggctcgccggccatcgaattcctcacgccgcgacagccctcttcaccggtcacgggcaccagtcgatcgatgaccggcgagtagcggtagacgccgcgactcaagccggacacccgttgtgcggacatgaagatagacacgggatacagccctccaccagacgggacagcgcgtacattataccgcacgatatcaccgctcgaacgtgggacatccacgtgccccgtcacaccggcagcacctctcagaaacgcagctacgtcacgcaggtctagggattcgccggtgtagttccgtccgctgcgccggcgggcgatcacttgctcgaggggtgcgcgcaccctgctggacctgggaagttcgatcacatcggcagcgaacgtgtcgcgatccatctgtccgtacgtaacgatcatggggtcaacgaaatagtcgccgaccgagacgttgaactccatatccccccgggcgatgcgcgaggcgagcaagaagtctgcagctgcgttagacagccccggcccatcagtgttgtcgcagcggaactcgtgggtccgaaaccccacaccttccgtgcccgggctctgcgctcgatacgacgtgatcgcagaactagccttccttaaaccgcccggagtagctaccatgaccgtcccctctgaggtctcccgaacacttgcgacaatagcagcatgtgggggcagccgccagaggcgggcatccttgtctcgacaaccattgacctccggattcgatatgtgcataatcatagtcgtgccaacacgaaacgtgtacgtctcggaagacgacctagacctgttcgccgaagccaccgagatcgctggaggcctgtccgcagcggtgttggaggccttgcgcagctacgtagacaggcaccatcgcgcggccggcggattcgacgagatcgagctggagctgcagaacgacggtatcgaccaccgtgtcaccttcatgggtcgccgcctgatacacatccgccgtccagatcccgagggaacccgcatagacactgtctacttgaccgccaaacaccaattcgccgttgccaccaaaatccaacgacggctgccagactggacggccggccacgagcacatctggtccgacccggagacctggaatcgggagttctggatcgcaggtgacaagacgatggccgtgtatcccagccttgacaaactccgcgaagctgaccccaatgtggccgaacgcgccgaggccgcggtcaaaatcccgccgttcgaggtcctggacatctgatgacagaatcatcatcttcccggcggcaattggcaatgccggtgctgtcagtcacggatctagccaagaaatacgtggttcatggcggctacgaggtcccggcactcaacggtgtctcgtttgacctgcacccgggagagatgctgggtttgttcgggccaaacggtgctggaaagacgacgctggtcaggatcatcgcgggcctcttatcggcagattctggagacgtccactggggatcggatcaaggtcgggccaggttaggctacgtgtcccaaaagggtggactgcagtacgggctcacgtgccgggaagagatggtcttccacgcacaatgcttcggccagtccgccaagcaggcccggactagcgtcgacgaggtcgccgcgatgctgcactgcgattacctgatggagtgggacgtcggaaggctctccggtgggcaacgccgaatcatcgaggtagggctagcactcgtcaatcaaccatcggtcgtcctgctcgacgagcccaccctgggcctggaccccgcaacacgcctgtcgttgtggcaaacggtaaagtcggcacgccgtgagaccggtgctgccttcctcgtcaccacccactacattgacgaggtggccgagcacctgtccaacgtcagcgtgatcaaccacggaaccgtcgtcgccaacggctcgccagcgcacatccgagaaatgttcgcgaccggggaagtaacgctcggcgtggccgaggatacggtggacagtgcggtggacgtgttggctgggaccgcgttcgaggcgcaccccaccgaaaccgtcccggggatcgtggtcaggtccaggcatcccgacgtggacgcggccaagatcatcaccatcctggctggtcatggcatctcggtggactccatatccgtacgcgaggcgaccttggaagaggcgtttctcacgatcacaggcagtcgagacccggagaggcaaatcccatgaacacttgcttcaggcgatatgcggcgatgtcgctgagagcgcggcgtgatttggccctgacattcatccagcccctcgtctacctagccctcttcggaccgctcttcgtcacgacgatgaagatgtcgcagagagctaccgccgctacgggttactccctatacatcacgggcctgtccatccaaatggccatgacgatcggtgccttcgcggggctaaccatcatcctcgaataccgactcggcatcctcgaacggatctggagcacccccctcacggggagcaagatgatggcggggcgaatcgcgcgcgacgtcgttatgatgatgatgccgatactggtcgtcttcatcatcggcctggtgctgggaacacgccccagcccactgggcctggcgacctacttcgtgacagtgctcggcacaggagccacgttcgccggggtctcctacgcggtggcactcagaacgaagagcgaggcagcgctatccgcgatcttcaacctcatcctgctacccatcctcctgctgtcggggatcatgctgcccatgtcgttcgcaccacactggatcgccaccgctgcccacgtgaacccgttgtggtacctggtgcaaggcgcgcggaaccagttcagcgttctagggctcgtggcggcggccccatggagttgggctgtggccatcgtcatgtcagccgctgccttcggctgggcaagccacgaattcaacaagaggcgctgacacaaagaatggtgccgggaacccaggtccccggcaccaccgagtgcactcgcgacgtcaacgcaccgttgcggtcactgcgcaggtcgagcacgaggacgacgagcccgcgctgctgcaggtcgagccgccaggcgcgagcaggtcgacgttagcgtcggcgccgccgaagacggacgtgacggccggctgagaggtgcggatgcggtgctccagcgaggaggtggtggtgagtttcatgggaggtgctcctaggagtgagacgagaacaaaccctagcgataggttagcagtccgcaaccgactccgggaatagtagaagcgcgcatccgtagcggaagaccttagcctgattacagtgaccctgttcgcgtctcaacattattccacacccccgagcagcgaacgacaccgcgatgatgatccgtcgcctctccaccgaagaactccgcgcccacatcgcaccgggccgccgtcccgtgcatcagacctgccgtcaacgtcggccatgaagctgggaaggtggctctcgtctaggagcagacgcgggacgcctcctccaggttgggccggggaagtgtccggttcttgatgtaggtggcggtccctattgatgggcgttgaccgtgggaatgcggtcggcgaagggggtggcgaacccgttgagcgcaggcttccagcgcatgcatcaacgctgtctgccggccaccggcaagcctcacccgcccgtcatggccatcatcgaggtgccggtgaatcctcgacacatgatcccaactcccccggaggggcttccggggctgttcagccaccagatcagccaggcggcgagcccgactctgccacccggaccctgcagagcgtgcctgctgccgtcgtgtcgtgtcgggccagtgggccaccagatcggccacatccgtcttggcccat

SEQ ID NO: 116 - DNA, 12654 bp, Propionibacterium acnes
  source 1..12654: mol_type = genomic DNA
gtgagtttcttccattgatgacaacagcacggtgctgccgtctgtgtgcggccccccaccccgcacacagttgccgtcgaggacgttgttcatgctctgtggtggccggtcctgagggcggctcgcaggatctcccggcgctcacggcgacgagcctggtagccaaggtctgcatgttcggcggcgagacgggctttgagggttgcggcttctgcacggcggtggagttggtcgtcgatgagttgggcgcgggccagacgccgcttatgggggttgtcgtgggtgaggggggcgtcgaggctgccgtcgtgggttagggccagggctgctcgttcggcgtcgtcgaggccgatgtggtggacggtcacgggtgcggtggtgacgtcgaggatgtccaggtggatgttgtggccgccgccgggggcttcggggaagtctggtgggctggcctggccggtgtcggggtcataccaggacaggccgatgatctcggcccagggtgggggcgggcagacggctcgcagaagggtgtgggccaggaacgtgttgcgggccatgatgcctccaagggtgaaaagcagtcgagtagcgatgacggcggggtagccgtctgctgggctgaggccgaccgggcccatgtcctcgatgctcttgtgctgcggccataccccaaagctaccaaacagtctttttaatctcaaagatacaaacagtgcttgacatattatctgcagcgaaagatactttcatcatggtggctgatcatgattacgcgactcctgacgatgagtggatgacacctcctcaggtggcccgtgtgattccgaacaccactgctcaggctgtccggcgctgggctgaggagggtcagcttcctggggcgtttcgtactccttctgggcgttggcatattccgtggtcggctgtggtgggcatcatggggtttgatccgcgtgagtccgcatcaccgagtgatcgtcaccagagctgacagagtcgtcgatgagctttcgagtgcagagctgatggcacgacggtctggatacttgtggagatgagagacgaccacatccagtcatggtcggggtacaccgaggggcagattcagcagtgctggcacgatgaggttgcccctgccattgactcgctcatggagcaggtaaggtctgttgccgagactcctgtgccgccgggttcgagattttacggcgatgagcagtgggccaagccttttcatccgtctactgcgatctgcggttcaatgggtccgccagcgatcacttgcacgcgctgaagctcctcgtctgggaagcgaacgtccaccatgtctatgcgccgtacacccttgctcgtgcatctattgaggcatcgtctactgctgtgtggctgttgagcacgaagacgcgcggagaacgtgtgctgcgagccttgcgatggtacgcgcaggattgtcacgactcgtgcaggttcatggatgatgagcagtatcgtgaccacctattgcggcgcattgaggggactgtcgctgcgggaaatctcgactcgcgcgctgctaggaaacggtaccgtgcaaccgatgttgtcgatgaggctgatcagctggttcccggaactctgagggcgtggcgagctttttctggtatggcccattcccgtatgtgggcatccagggggctgctcgacatggaagtgctgtccagtggccaaggaatggttacggcgaaggtgacgagcggatcggcccaaatcctttgggccgtcgtggcagctctgaatgttgctctcagtgccgctcgcttgtggcgtgattcgatgtgctcaccgtttgctgttgcccagtcggtagacgcgatgccagaggcgtttcgccgccctgtttagggtctgatcggggtagtgggtgttcacggggtcccaggttggccatggggcggcttggtgatgtgagttgggttgtgtggcagcctgggtgttgggtgtggcttcgttggccacgaaggcatgctcttccttgtgctgggacttgagtccccagtgctctcccctttgctagtggggggtggggtccccggaggtaggtcctccggggactttttctatgtctgtccgtgccccaggatttcgtatctaggcagtaccaattttgggttagttggaggtttctttggtaatggacagggtgagggtgatgaagaggtggccgtccttggtggcagaaattttctcgaacttcagctgaatgttgttatcagccactatctgttgggcggtgaggtgctcggagagcttctggaatccttcgcggatccacaggttgtaggggttggtgaccgagaccgaagggtatgggtcgaccttcagcgtcaggactggctggtctgggttgagggagttgatcttcaccagtttggggtaccggtcgcactcatgtgtctcttgtgttgggggccagcagtcgggggcccattcctcccagtggtcacgcatctcacgaagtactttcctgcatctcagcctctgcaggagctcgcgcgccaccgatgggagggctgccatgatgagggcaaggactgcgaacccgatgatgtaattgaccgtgtccctcgtcacgccgttcttgccgaggattccgatggcgaacgcgatgacgacaccgcccaggcacaggtgcatggggtcatgctgtgatggtttttcttcttcagcgactggtggggctatagtcatgtgtgccccttagtactaagtgatactggtgggttgcttttccccggtggccgtgtgcaagacggccaccggggttttccttcatgttcctgattttatctgcccggtgtggcgttttcatctttgtgtgggtggttcgcctggggtcttggagtgtggtgacgcggtgatggtcacggtgacggtgactgtggcgcgtggcgggtgaggtggttctttcctggtctggtgtgtggcccaggtgagtgtggtgatgagggccagggtgaggatgatgaccagggtggggagtagtttgtctggccggtgtcgccgggcttggtggcgcggcatgtttttccagggtgtgtctccgaacaggtcgtcgtcggaggggtcgtcgtggttcatagggtggccttggcgatggtggtgggcgagtttggtccaggtgatggtgccgtcggaggcgatgtggcggtcggcgggcagggtgtggacggtccatccggcgtcggtgagggcggtggtgaaggatttcttgatggatcgtttgggtaggtcgatgggggcgtgggtgccgacccagatgcaccggtttttgaggtgggtggcgccgaggtggttcatgtcgcggaccatgttttgggtgagtgtgagggtgtcggggtcccattggacggggatgatgatgtggtctgcgatggtgatggcgtgttgccaggcggcgtcgaggtcgttgtttccggtgtcgaggatgatgacgtggaagcggcttcttagggcggtgatgatgcggtcgaggtcgtcggcggtggggggtgtgatgaggctgttgtggttgtcggtgatggtgggtaggcatgtgatggtggcccagccttctggttgccaggagatgtaggggtcgaggtcgcggggttgggaggcgaatcctgggtgacgggctgcgcgggcgaggtcgatgacggtgttgtcggtgtggcggggtgcgcgggtggagagggtgccgcgtgggttgatttccacgacgacgatgtcgtcgtgtcctgctgtggtggcgagggcttgggcaaggatgacggccagcggggttttgccggtgccgcctttgaggttggcgagggtgatgatgtggtcggtgagttgggcgggtgcggcggtgtggtgagggttggcggtgaggttggcgatggtgaacagggcatcgagatcgtcggtggtgttctgctcggtgggttgggggtcgccggagatgatcgggtcggcgcggcgcggctgccatgccggcctcaccactgtcacgaccaccacgggtctgctggcgctgtgtgggtgtcgtcggcgatgactcacgatcggcagtctcaccatcgtctcggtgatgctcggctagcgctggacccggtcaagttcgggccggctcacccagtggtgatgactcggtcacagaaccgctgccggtcgttatctcggacgtctcgactcctccagtcctgatgggcgttggagccacctacacctactctcagaacgaccccgacctcgtgtggggcgggggcagatgtcacttgggccaatcgagagcccaggtgatggggaaagcaggggtgtgatatctgtcctggaaaactgggcagctgctaccgtggattgacggatctccacgaaagaagggaatgcgaccatgcagatcaccgtcaagaccatcaaagatcatcgggttcgcactgtccagaccgccatgagcagcgccttggggattggttcccaggtagacatgctcgcccccggcggttccaccagctcgagttccggttcatgctgctcgtgctcgacctgcgcggtagtggcgcagcctcaagactgaacggctggtcagccccaggggcgtggcgctcatcgcgtcacgccccttctattcgctggacagggtgcgcgagctgaggaacatcgcggtgtgtgcgatgacgaggggcaggagcaagtctgtgcgggttgccaagtagccctgcgcgatggccatcacgctggccccgacggcggcgaagacacctccgatacgtcgcttcatgccgccgaattgcatcaggacgaataggactcccgcggtccacatccctccgggcatgcatctgggaaagatgaaccggaagatgatctcttcacaggagagctggagtactagcagcgtagcccccacggggagactcacctctactgacagacggatcgtcttcatccacccacccgagctggcatcgaccatttcggtggccatgcgcgaccggtggcctcgtgcctctcgctgcgtgtcgatccagccgagcagtccgtggacgctctccgctaggactcctgacgcgacagtctcaccaattcctaagcccacggcgaggaccgcgacgcccccctgcacggcaggctgtgtgacttggtggtcccaccaacccgccggcaggaccatgcgtgcgaggctgcacacgagcaggaggtggagggtcacgacgagcgacatctggaataccgcttgccgttcggcgatggtggcgttgggaaagagcggtaggccggcacgggcagcggcgctcgacagcttccgcaagagcggtttggagacgaagtagtaggcgacgtacagcgccagcgctgtcgcgatgatgatcatcggtctgccaccgagctgacccgccgatagccgtttctgttccaccaatactggctgttgtagatcaggtggcccagaacacaggcccagatcccccagaagatgaacaggatagtccccaaggcggcgagcgggatcttggagaggacctgtccccgtccgaacaccgagtggccgcaagcaaacaagagtgctcccacagcggtgagcgcgagccaggccggggttgctcgcagactgatcaccgggaccccgacccggaagccgacctcttctcctacagcgatgactagcaactgccacagcggcatgttctgaacggagcgcgcgactcgggctcgagtcacccacacgggctgttgagcgctcacatcaccactcaggtaccccggtgaggcacttcgcttagtactggggcccgatgtgcgagcattcgtgatgtgtcgcaggatccggttgtcaagccaagaggccagcagggctccggcgacagtgacgggtagcccgatcagcacgaggccccagccatgcggtgccgagaggtttctggccggcgtgcacgcgaggcaggcaagtgccaacactgccagcactacgacgtagatggtcgcataattcgacttgcgggtgacgttgccgaccatcttggccaaagtcgctggggaccagctgatgagtgcgatggtggtcagcaggaagcaggaccagacagacatccggcgcactcaggggtatgggtgcggctgtgggttttggaaaccgccatatgcggcgtagcgggggtgtgcccgcatgggtgcgctgggcagtgacagggcgagcagcccaggcgcccagagcctgacacagtgcagtcccagcccctggatctctatggtggtgaaatcttcgatgtacaggggtgacacacaggtgatgctgttgaccacgctctttaccagttccgcccccgtgtgggtgtcgtcaggtggcaggtcttcggcttgggcaatggtgcccgcgtcgaatttcgccacaactgattgcgcggcctgatagttcctcgcgtagtaggagacgttcgagtcgaggtcaagcatgtcctccgtggacatactggacgcgtcggcctcggcgtcgaaagacgtccataccgcgagcatccgaaccccgctgcactcgagaaacgccttgtacatggctgcttccagacccgcgtctgcacctaggccgacggcgacgaggggaagttggttgccactaccgaccatcatgcatgccacggtgaaatgcttgagcccgggagtcggaagccagtagaaacgcagttcgtggcttcggcccgctgcacgttccacgagccgctggatgcgctggaggcggggtccttcgacgcggatgcgcacaggtgacgaggctccataccacaggcccatcgcggcatctacctggatcaattcataagccgcggacagcgttgcggcgacgcgtgaagtgtggacggcggtgccggtcgtcacggccgttcccagccacggctcaccgtcgtgccgacgggggttgtaacccaggtaaaagaactgcgccgggatccactcctgccgggaggtcccgacacggggagtcttgacccatgtcatgggcaagtcgtcgcgataggtgtcgaacgcacctccagccactcgttgcgcgaagccgaatgcgcccagatcgagaacttcgtcctcggtccgggcgaggagttcctgacgagtcgcccagcgccgttcgaagggactatggagaatcccggtacccgcgcagtagcgctcgacggcctccgcgtagaccttgatctctgcctcaaactcgttcagccccaccccaccgatgtggtagctacccggcttggggtcgggccggtcaagcagtgcgtgcatccccgtgagttccccaccgttcacccgcacgcgggggccgagcgcggggtgcagcgagtagccgacggaagtcaccagcccgcatagcgggctgtaggtgcgccgcctgagccgggctgcggtctcgacggggtcgctatcctggcgaagcttcatcgctcgccccctgccgccagccactcacggatgtcgtagtacaggtccggagcggtttcaacctgcgctggtgcatcaaaacgggacataggtaggacgtcgttgtaggcgatctccatcgtcggtatgtagaccgacaacactttgttgcgcgtcgtgttgaggccgttgcgggcgatgctgacagcctcatgcgcgacgtgcgcggccaagatcgcgcgcaccgacgctgccacggccggcgctccggcccttacgcggtcggcagcggccacccgcatccaggacaggtagctctgccgttcgcgcaggttcatcgcgacccgctgctcgaaggtccggtaggacgaggtcgcaccagggacgacgtagggacccacgtacaaggccggcccgtctacagctgcgtggagccacgacaggtgggcgcgtcgggcgaacaggtcaagggcgcgcagcatagccgggttgttctgcgccagcgctaccacaaggagtggctgcaggtccggcgccgaacccagcaacgccaacatctgggaggcctcctgctccatgtgcaactcgtcggccgactgctcaagccgcaggcctgcgaagagggtggctgatggctgcgtgtcgtcagcgaggacggtagcctgcagcccctctccctcgagaatctgctggatatcgccggcgaggagcgcgtcgtcgctgaatacccacaccgggcgcgtctctctacctccatccatcttgtcctcaacgttttcgaccagcgcaccgatcgatgctaggtgggccatcacgtcgtcaagggccgcgcgggtcaatccgggcacccgggacacgatctcgggcggctgcagtccttggctcaacaagtccaaggccggccacagggtcccggtggcgtcgtcgtcctccagcgttgtgctctcggcgttccagacgcctcgacggaactccaccctgtccatcgagtaaggcaccatcatgaggcccggtgaaatgtggttggtcactttggctcctgtacagcctaggcttggacgcccacggtcatggtgtgggtcgcggtttggaaaatcccgtcgaggttgagtgcctgattgagttcgtcctcgtagaagcttgaggactcgactgaggcaagaccgagccccgtgcagaccaagttgatctgttgtgcgatcgccccgacttcttgaagggcgaacctcaaacccctggctccgtacttccgcatcgccctccacggcgagatgacgaacaccaagtgcactccggccgcatccgattgctccacggccggctcgccggccatcgaattcctcacgccgcgacagccctcttcaccggtcacgggcaccagtcgatcgatgaccggcgagtagcggtagacgccgcgactcaagccggacacccgttgtgcggacatgaagatagacacgggatacagccctccaccagacgggacagcgcgtacattataccgcacgatatcaccgctcgaacgtgggacatccacgtgccccgtcacaccggcagcacctctcagaaacgcagctacgtcacgcaggtctagggattcgccggtgtagttccgtccgctgcgccggcgggcgatcacttgctcgaggggtgcgcgcaccctgctggacctgggaagttcgatcacatcggcagcgaacgtgtcgcgatccatctgtccgtacgtaacgatcatggggtcaacgaaatagtcgccgaccgagacgttgaactccatatccccccgggcgatgcgcgaggcgagcaagaagtctgcagctgcgttagacagccccggcccatcagtgttgtcgcagcggaactcgtgggtccgaaaccccacaccttccgtgcccgggctctgcgctcgatacgacgtgatcgcagaactagccttccttaaaccgcccggagtagctaccatgaccgtcccctctgaggtctcccgaacacttgcgacaatagcagcatgtgggggcagccgccagaggcgggcatccttgtcccgacaaccattgacctccggattcgatatgtgcataatcatagtcgtgccaacacgaaacgtgtacgtctcggaagacgacctagacctgttcgccgaagccaccgagatcgctggaggcctgtccgcagcggtgttggaggccttgcgcagctacgtagacaggcaccatcgcgcggccggcggattcgacgagatcgagctggagctgcagaacgacggtatcgaccaccgtgtcaccttcatgggtcgccgcctgatacacatccgccgtccagatcccgagggaacccgcatagacactgtctacttgaccgccaaacaccaattcgccgttgccaccaaaatccaacgacggctgccagactggacgaccggccacgagcacatctggtccgacccggagacctggaatcgggagttctggatcgcaggtgacaagacgatggccgtgtatcccagccttgacaaactccgcgaagctgaccccaatgtggccgaacgcgccgaggccgcggtcaaaatcccgccgttcgaggtcctggacatctgatgacagaatcatcatcttcccggcggcaattggcaatgccggtgctgtcagtcacggatctagccaagaaatacgtggttcatggcggctacgaggtcccggcactcaacggtgtctcgtttgacctgcacccgggagagatgctgggtttgttcgggccaaacggtgctggaaagacgacgctggtcaggatcatcgcgggcctcttatcggcagattctggagacgtccactggggatcggatcaaggtcgggccaggttaggctacgtgtcccaaaagggtggactgcagtacgggctcacgtgccgggaagagatggtcttccacgcacaatgcttcggccagtccgccaagcaggcccggactagcgtcgacgaggtcgccgcgatgctgcactgcgattacctgatggagtgggacgtcggaaggctctccggtgggcaacgccgaatcatcgaggtagggctagcactcgtcaatcaaccatcggtcgtcctgctcgacgagcccaccctgggcctggaccccgcaacacgcctgtcgttgtggcaaacggtaaagtcggcacgccgtgagaccggtgctgccttcctcgtcaccacccactacattgacgaggtggccgagcacctgtccaacgtcagcgtgatcaaccacggaaccgtcgtcgccaacggctcgccagcgcacatccgagaaatgttcgcgaccggggaagtaacgctcggcgtggccgaggatacggtggacagtgcggtggacgtgttggctgggaccgcgttcgaggcgcaccccaccgaaaccgtcccggggatcgtggtcaggtccaggcatcccgacgtggacgcggccaagatcatcaccatcctggctggtcatggcatctcggtggactccatatccgtacgcgaggcgaccttggaagaggcgtttctcacgatcacaggcagtcgagacccggagaggcaaatcccatgaacacttgcttcaggcgatatgcggcgatgtcgctgagagcgcggcgtgatttggccctgacattcatccagcccctcgtctacctagccctcttcggaccgctcttcgtcacgacgatgaagatgtcgcagagagctaccgccgctacgggttactccctatacatcacgggcctgtccatccaaatggccatgacgatcggtgccttcgcggggctaaccatcatcctcgaataccgactcggcatcctcgaacggatctggagcacccccctcacggggagcaagatgatggcggggcgaatcgcgcgcgacgtcgttatgatgatgatgccgatactggtcgtcttcatcatcggcctggtgctgggaacacgccccagcccactgggcctggcgacctacttcgtgacagtgctcggcacaggagccacgttcgccggggtctcctacgcggtggcactcagaacgaagagcgaggcagcgctatccgcgatcttcaacctcatcctgctacccatcctcctgctgtcggggatcatgctgcccatgtcgttcgcaccacactggatcgccaccgctgcccacgtgaacccgttgtggtacctggtgcaaggcgcgcggaaccagttcagcgttctagggctcgtggcggcggccccatggagttgggctgtggccatcgtcatgtcagccgctgccttcggctgggcaagccacgaattcaacaagaggcgctgacacaaagaatggtgccgggaacccaggtccccggcaccaccgagtgcactcgcgacgtcaacgcaccgttgcggtcactgcgcaggtcgagcacgaggacgacgagcccgcgctgctgcaggtcgagccgccaggcgcgagcaggtcgacgttagcgtcggcgccgccgaagacggacgtgacggccggctgagaggtgcggatgcggtgctccagcgaggaggtggtggtgagtttcatgggaggtgctcctaggagtgagacgagaacaaaccctagcgataggttagcagtccgcaaccgactccgggaatagtagaagcgcgcatccgtagcggaagaccttagcctgattacagtgaccctgttcgcgtctcaacattattccacacccccgagcagcgaacgacaccgcgatgatgatccgtcgcctctccaccgaagaactccgcgcccacatcgcaccgggccgccgtcccgtgcatcagacctgccgtcaacgtcggccatgaagctgggaaggtggctctcgtctaggagcagacgcgggacgcctcctccaggttgggccggggaagtgtccggttcttgatgtaggtggcggtccctattgatgggcgttgaccgtgggaatgcggtcggcgaagggggtggcgaacccgttgagcgcaggcttccagcgcatgcatcaacgctgtctgccggccaccggcaagcctcacccgcccgtcatggccatcatcgaggtgccggtgaatcctcgacacatgatcccaactcccccggaggggcttccggggctgttcagccaccagatcagccaggcggcgagcccgactctgccacccggaccctgcagagcgtgcctgctgccgtcgtgtcgtgtcgggccagtgggccaccagatcggccacatccgtcttggcccat

SEQ ID NO: 117 - DNA, 12567 bp, Propionibacterium acnes
  source 1..12567: mol_type = genomic DNA
gtgttccagtgcctcgcgggcgtgatgttcttcttcggcaccttcttgccacatgcttcgcgcttcagcctcgccatccaagcgaacctggactgtgaacgagtcctcatcgggtccgtcctcattccacgcggcaatgatcccacgggcctcgtctgcgacctgactcaacttcatcgcctgcccgacagccccgagagccggaatctcgaacacccagatattcgcctcagccgagacctcacgatgggcgatcacttcgtaggtcgtctcaccttctactgtcgtgtccattacttccactccttcggaattttcacgcctgctcgctccagctgtgccaggacaccaactgacgtcagctggtgtcctgctggtatcgatacgcgcccggctccgccggggcgtccccagatttcatggcttcccttggcgttccgcagacgggcccatccttgagaacggagcagcttgaggacgtccttagttttctgcggtttcacacatcatagtatagccccacttaacttgtaaactaagcccctgtttacattttagttggtgcatgtgatccctgctcttatgacgtcgcccgacctggcgccttagacatgcactgttcatcctcaaccacactcaccgtcacgggtccgaaggcgaggtctatcaccattcgcatcgatgaagttgaagcaggatcgtccgcatcacgcactgccgatccggacagacgccaccggccgtaccgactgtttacgatctgccaccgcagactgctgccataaccgctatcacctctgatagtacgtttagtactatcagaggtgattcaagattctcctgtcgagcagccctacagtcacgaagtcctgcgatcgtcatcgcttaaggcagacggatggccatcggggaccactcgcaaagcaggggcgatcagcaacagtgatgtgccatgagcaagtactggtgcaccggctgtttactccgcccctagataaaccacgggtgcaggggtggacaccacaccatgaccgatgtggtgcccaccccatggctcacaggcaggccctatcgccgggagcactgctgcagatgaggctcagtaacctgccatgtctcacctggggccaaggtgccaagctccccacggaatctcaggcatcggaaaccagcagccgaacttccacagcatgagcgccctacgaaaaagcaggccgccgacggttctcaagaactcgccggcggcctgcatcgccactcgaactgtaaccgtggtccgaccccgtgcacaggtaagctccacactcccaccaggcatggccgaggcagtaccaagttgccgtggcccatcggcagatttggttaaattttgaaaagtcatatagactccttctgtaaatttttaaatctcataggactctcgccatcgccagccagcttcgacaggagtcccgatgtttcaccgagtgaaatatcggcaccgtttgagttgacctaaagctcaaaagatgctagaatccatcttacctcgttaggggcgttttgtcaaacgcccctatattgcgtgtcttcgcgcgtcgtagcgctgatgctgcgcctgtgtcgactatccgtttgtaagtactttcgatgacaccagcagtggctactcatgactggtgcgtgcgggtctaaagcagcagggaaaggaatcgcagtagaagccgcttgattcctatcacccctgatggtactatcagtactaacagagcagggcttactcgatgcgtgagaatcggggacatgctgagcctctcgtaggtcattggcctgctgggcgtcagtgtggcgcggttcgatccagtgaactctatcagctctgttagtactgtcagagttgatatattcgaccccaggaggagcccatgagttacatcgttcgcaccggaaatttggtcgacacccccgagctgcgtgagggagagcatggcccgtacacctacgctcgcgtcatcgtgtccgatcgcattcgccaggaggacggcagctacgtcaacgggccagcgatcgcctacgacgtcttggcgggtggcagccaagccgtgaatctggttgaagccgccaaggcgagcggcaacatccgcatcatgttcgcgggccgttaccgcgtcaccgagtggcggggtgagcagggcactcgtatccagcatgaggtccgagccgacgaagtgagcgtgagcctgctcggtcagagggtgaccgtggagcggcctcgaggtgacgtggcatccaaggagagcacgtcgttctgattgagtccgggggcacggtggtcgccgtggtaaaccgtgcccctgacagtactattgacactattggaggtatcagtgtgactgctcaaattttcgccttgtgcaaccagaagggtggcgtcggaaagtcgacatcgacgtttcatctggcccgtgccgcggtgttgcgtggccagcgtgtgcttgtcgtcgacaacgacccccagggcaacctgacgtctgtcgcggccgccgagcccgtgggggaggatcaggcggggctggccgatgtgctcagcgcgcgtgctccagagaccctccgcgatgtgatcgtgccgggaatctggtctggcctcgatgtcgtgccgacgtctggcatcacgctcggctgggtgcgtgacgaactcgtgatcgccggtgccggccgagaaggccggctgcgggaggccctggccggcgtcgaggacgactacgacgtgatcctgatcgactgtgctccatcgctcgatcagctcacgatcaacggcctggtggccgcccagggtgtcatcgtcgtgacgcactcgaagttgtggagcgccaacggcctcgcccagctgctcgacaccatcgacagcgtgcgcagctactacaacggcgcgctgcgcgtggcgggcatcatcgtcaaccagcacgaggagaacaccatcagcgggaaaacctggctcgacgagctgcatcaggctgccgagtcccggaagctgaccgtgcttgacccgccgatccccaagcgtgtcgtcatcgccgataccgtcgaggccgcgcgcggtctcgacgagtggggaagtgccgaggcggccgcgctcggccagttgtacgcccaccacctgacctgcatcgaaggagccctgtgatgacccgtccagccccccgaaagtcctcattgagcggatcaactccggtcgccccgccggctcagacggcgccggcaccgtctgccgcacctaccccccacaaggccgatgagtcacagacgagcagcaccacgaggaagtggcggcacaaggtgtcgttctaccaggacccggccgacaccgaccgggtgcgcggggcgatcctttacacgatgacgaccgagggcaaccggaacctgagccagttcgtcaacgatgccgtcatggccaaggtggtcgagctggaagtcaagtacaacgatggccagccattccccgctgtgggagcccgaggactaccccagggcggtgcagccgccgccggtgagtagaggaccatcgaccgtcgggggcttcaccatgcccccgaccctcggtcatcctgatcctcttgtcgatggtggtgacagtgggggattcacgcctcgttcagatcagaggaagtctcaccgcgtgattagtactatcaaatctgacagtactaacagagcagatagggttccctaggtcgagctgtatcacgccgacaaccagtgagccagtgatctacgaggggcgcaatatgcacccgatcggtagccgcgaaggcctcgccctgccccgatagtactatcaccactatcaatggtgctagtggtgagtttcttccattgatgacaacagcacagtgctgccgtctgtgtgcgggccaccagcccgcacacagttgccgtcgaggacgttgttcatgctctgtggtggccggtcctgagggcggctcgcaggatctcccggcgctcacggcgacgagcctggtagccaaggtctgcatgttcggcggcgagacgggctttgagggttgcggcttctgcacggcggtggagttggtcgtcgatgagttgggcgcgggccagacgccgcttatgggggttgtcgtgggtgaggggggcgtcgaggctgccgtcgtgggttagggccagggctgctcgttcggcgtcgtcgaggccgatgtggtggacggtcacgggtgcggtggtgacgtcgaggatgtccaggtggatgttgtggccgccgccgggggcttcggggaagtctggtgggctggcctggccggtgtcggggtcataccaggacaggccgatgatctcggcccagggtgggggcgggcagacggctcgcagaagggtgtgggccaggaacgtgttgcgggccatgatgcctccaagggtgaaaagcagtcgagtagcgatgacggcggggtagccgtctgctgggctgaggccgaccgggcccatgtcctcgatgctcttgtgctgcggccataccccaaagctaccaaacagtctttttaatctcaaagatacaaacagtgcttgacatattatctgcagcgaaagatactttcatcatggtggctgatcatgattacgcgactcctgacgatgagtggatgacacctcctcaggtggcccgtgtgattccgaacaccactgctcaggctgtccggcgctgggctgaggagggtcagcttcctggggcgtttcgtactccttctgggcgttggcatattccgtggtcggctgtggtgggcatcatggggtttgatccgcgtgagtccgcatcaccgagtgatcgtcaccagagctgacagagtcgtcgatgagctttcgagtgcagagctgatggcacgacggtctggatacttgtggagatgagagacgaccacatccagtcatggtcggggtacaccgaggggcagattcagcagtgctggcacgatgaggttgcccctgccattgactcgctcatggagcaggtaaggtctgttgccgagactcctgtgccgccgggttcgagattttacggcgatgagcagtgggccaagccttttcatccgtctactgcgatctgcggttcaatgggtccgccagcgatcacttgcacgcgctgaagctcctcgtctgggaagcgaacgtccaccatgtctatgcgccgtacacccttgctcgtgcatctattgaggcatcgtctactgctgtgtggctgttgagcacgaagacgcgcggagaacgtgtgctgcgagccttgcgatggtacgcgcaggattgtcacgactcgtgcaggttcatggatgatgagcagtatcgtgaccacctattgcggcgcattgaggggactgtcgctgcgggaaatctcgactcgcgcgctgctaggaaacggtaccgtgcaaccgatgttgtcgatgaggctgatcagctggttcccggaactctgagggcgtggcgagctttttctggtatggcccattcccgtatgtgggcatccagggggctgctcgacatggaagtgctgtccagtggccaaggaatggttacggcgaaggtgacgagcggatcggcccaaatcctttgggccgtcgtggcagctctgaatgttgctctcagtgccgctcgcttgtggcgtgattcgatgtgctcaccgtttgctgttgcccagtcggtagacgcgatgccagaggcgtttcgccgccctgtttagggtctgatcggggtagtgggtgttcacggggtcccaggttggccatggggcggcttggtgatgtgagttgggttgtgtggcagcctgggtgttgggtgtggcttcgttggccacgaaggcatgctcttccttgtgctgggacttgagtccccagtgctctcccctttgctagtggggggtggggtccccggaggtaggtcctccggggactttttctatgtctgtccgtgccccaggatttcgtatctaggcagtaccaattttgggttagttggaggtttctttggtaatggacagggtgagggtgatgaagaggtggccgtccttggtggcagaaattttctcgaacttcagctgaatgttgttatcagccactatctgttgggcggtgaggtgctcggagagcttctggaatccttcgcggatccacaggttgtaggggttggtgaccgagaccgaagggtatgggtcgaccttcagcgtcaggactggctggtctgggttgagggagttgatcttcaccagtttggggtaccggtcgcactcatgtgtctcttgtgttgggggccagcagtcgggggcccattcctcccagtggtcacgcatctcacgaagtactttcctgcatctcagcctctgcaggagctcgcgcgccaccgatgggagggctgccatgatgagggcaaggactgcgaacccgatgatgtaattgaccgtgtccctcgtcacgccgttcttgccgaggattccgatggcgaacgcgatgacgacaccgcccaggcacaggtgcatggggtcatgctgtgatggtttttcttcttcagcgactggtggggctatagtcatgtgtgccccttagtactaagtgatactggtgggttgcttttccccggtggccgtgtgcaagacggccaccggggttttccttcatgttcctgattttatctgcccggtgtggcgttttcatctttgtgtgggtggttcgcctggggtcttggagtgtggtgacgcggtgatggtcacggtgacggtgactgtggcgcgtggcgggtgaggtggttctttcctggtctggtgtgtggcccaggtgagtgtggtgatgagggccagggtgaggatgatgaccagggtggggagtagtttgtctggccggtgtcgccgggcttggtggcgcggcatgtttttccagggtgtgtctccgaacaggtcgtcgtcggaggggtcgtcgtggttcatagggtggccttggcgatggtggtgggcgagtttggtccaggtgatggtgccgtcggaggcgatgtggcggtcggcgggcagggtgtggacggtccatccggcgtcggtgagggcggtggtgaaggatttcttgatggatcgtttgggtaggtcgatgggggcgtgggtgccgacccagatgcaccggtttttgaggtgggtggcgccgaggtggttcatgtcgcggaccatgttttgggtgagtgtgagggtgtcggggtcccattggacggggatgatgatgtggtctgcgatggtgatggcgtgttgccaggcggcgtcgaggtcgttgtttccggtgtcgaggatgatgacgtggaagcggcttcttagggcggtgatgatgcggtcgaggtcgtcggcggtggggggtgtgatgaggctgttgtggttgtcggtgatggtgggtaggcatgtgatggtggcccagccttctggttgccaggagatgtaggggccgaggtcgcggggttgggaggcgaatcctgggtgacgggctgcgcgggcgaggtcgatgacggtgttgtcggtgtggcggggtgcgcgggtggagagggtgccgcgtgggttgatttccacgacgacgatgtcgtcgtgtcctgctgtggtggcgagggcttgggcaaggatgacggccagcggggttttgccggtgccgcctttgaggttggcgagggtgatgatgtggtcggtgagttgggcgggtgcggcggtgtggtgagggttggcggtgaggttggcgatggtgaacagggcatcgagatcgtcggtggtgttctgctcggtgggttgggggtcgccggagatgatcgggtcggcgcggcgcggctgccatgccggcctcaccactgtcacgaccaccacgggtctgctggcgctgtgtgggtgtcgtcggcgatgactcacgatcggcagtctcaccatcgtctcggtgatgctcggctagcgctggacccggtcaagttcgggccggctcacccagtggtgatgactcggtcacagaaccgctgccggtcgttatctcggacgtctcgactcctccagtcctgatgggcgttggagccacctacacctactctcagaacgaccccgacctcgtgtggggcgggggcagatgtcacttgggccaatcgagagcccaggtgatggggaaagcaggggtgtgatatctgtcctggaaaactgggcagctgctaccgtggattgacggatctccacgaaagaagggaatgcgaccatgcagatcaccgtcaagaccatcaaagatcatcgggttcgcactgtccagaccgccatgagcagcgccttggggattggttcccaggtagacatgctcgcccccggcggttccaccagctcgagttccggttcatgctgctcgtgctcgacctgcgcggtagtggcgcagcctcaagactgaacggctggtcagccccaggggcgtggcgctcatcgcgtcacgccccttctattcgctggacagggtgcgcgagctgaggaacatcgcggtgtgtgcgatgacgaggggcaggagcaagtctgtgcgggttgccaagtagccctgcgcgatggccatcacgctggccccgacggcggcgaagacacctccgatacgtcgcttcatgccgccgaattgcatcaggacgaataggactcccgcggtccacatccctccgggcatgcatctgggaaagatgaaccggaagatgatctcttcacaggagagctggagtactagcagcgtagcccccacggggagactcacctctactgacagacggatcgtcttcatccacccacccgagctggcatcgaccatttcggtggccatgcgcgaccggtggcctcgtgcctctcgctgcgtgtcgatccagccgagcagtccgtggacgctctccgctaggactcctgacgcgacagtctcaccaattcctaagcccacggcgaggaccgcgacgcccccctgcacggcaggctgtgtgacttggtggtcccaccaacccgccggcaggaccatgcgtgcgaggctgcacacgagcaggaggtggagggtcacgacgagcgacatctggaataccgcttgccgttcggcgatggtggcgttgggaaagagcggtaggccggcacgggcagcggcgctcgacagcttccgcaagagcggtttggagacgaagtagtaggcgacgtacagcgccagcgctgtcgcgatgatgatcatcggtctgccaccgagctgacccgccgatagccgtttctgttccaccaatactggctgttgtagatcaggtggcccagaacacaggcccagatcccccagaagatgaacaggatagtccccaaggcggcgagcgggatcttggagaggacctgtccccgtccgaacaccgagtggccgcaagcaaacaagagtgctcccacagcggtgagcgcgagccaggccggggttgctcgcagactgatcaccgggaccccgacccggaagccgacctcttctcctacagcgatgactagcaactgccacagcggcatgttctgaacggagcgcgcgactcgggctcgagtcacccacacgggctgttgagcgctcacatcaccactcaggtaccccggtgaggcacttcgcttagtactggggcccgatgtgcgagcattcgtgatgtgtcgcaggatccggttgtcaagccaagaggccagcagggctccggcgacagtgacgggtagcccgatcagcacgaggccccagccatgcggtgccgagaggtttctggccggcgtgcacgcgaggcaggcaaatgccatcactgccagcactacgacgtagatggtcgcataattcgacttgcgggtgacgttgccgaccatcttggccaaagtcgctggggaccagctgatgagtgcgatggtggtcagcaggaagcaggaccagacagacatccggcgcactcaggggtatgggtgcggctgtgggttttggaaaccgccatatgcggcgtagcgggggtgtgcccgcatgggtgcgctgggcagtgacagggcgagcagcccaggcgcccagagcctgacacagtgcagtcccagcccctggatctctatggtggtgaaatcttcgatgtacaggggtgacacacaggtgatgctgttgaccacgctctttaccagttccgcccccgtgtgggtgtcgtcaggtggcaggtcttcggcttgggcaatggtgcccgcgtcgaatttcgccacaactgattgcgcggcctgatagttcctcgcgtagtaggagacgttcgagtcgaggtcaagcatgtcctccgtggacatactggacgcgtcggcctcggcgtcgaaagacgtccataccgcgagcatccgaaccccgctgcactcgagaaacgccttgtacatggctgcttccagacccgcgtctgcacctaggccgacggcgacgaggggaagttggttgccactaccgaccatcatgcatgccacggtgaaatgcttgagcccgggagtcggaagccagtagaaacgcagttcgtggcttcggcccgctgcacgttccacgagccgctggatgcgctggaggcggggtccttcgacgcggatgcgcacaggtgacgaggctccataccacaggcccatcgcggcatctacctggatcaattcataagccgcggacagcgttgcggcgacgcgtgaagtgtggacggcggtgccggtcgtcacggccgttcccagccacggctcaccgtcgtgccgacgggggttgtaacccaggtaaaagaactgcgccgggatccactcctgccgggaggtcccgacacggggagtcttgacccatgtcatgggcaagtcgtcgcgataggtgtcgaacgcacctccagccactcgttgcgcgaagccgaatgcgcccagatcgagaacttcgtcctcggtccgggcgaggagttcctgacgagtcgcccagcgccgttcgaagggactatggagaatcccggtacccgcgcagtagcgctcgacggcctccgcgtagaccttgatctctgcctcaaactcgttcagccccaccccaccgatgtggtagctacccggcttggggtcgggccggtcaagcagtgcgtgcatccccgtgagttccccaccgttcacccgcacgcgggggccgagcgcggggtgcagcgagtagccgacggaagtcaccagcccgcatagcgggctgtaggtgcgccgcctgagccgggctgcggtctcgacggggtcgctatcctggcgaagcttcatcgctcgccccctgccgccagccactcacggatgtcgtagtacaggtccggagcggtttcaacctgcgctggtgcatcaaaacgggacataggtaggacgtcgttgtaggcgatctccatcgtcggtatgtagaccgacaacactttgttgcgcgtcgtgttgaggccgttgcgggcgatgctgacagcctcatgcgcgacgtgcgcggccaagatcgcgcgcaccgacgctgccacggccggcgctccggcccttacgcggtcggcagcggccacccgcatccaggacaggtagctctgccgttcgcgcaggttcatcgcgacccgctgctcgaaggtccggtaggacgaggtcgcaccagggacgacgtagggacccacgtacaaggccggcccgtctacagctgcgtggagccacgacaggtgggcgcgtcgggcgaacaggtcaagggcgcgcagcatagccgggttgttctgcgccagcgctaccacaaggagtggctgcaggtccggcgccgaacccagcaacgccaacatctgggaggcctcctgctccatgtgcaactcgtcggccgactgctcaagccgcaggcctgcgaagagggtggctgatggctgcgtgtcgtcagcgaggacggtagcctgcagcccctctccctcgagaatctgctggatatcgccggcgaggagcgcgtcgtcgctgaatacccacaccgggcgcgtctctctacctccatccatcttgtcctcaacgttttcgaccagcgcaccgatcgatgctaggtgggccatcacgtcgtcaagggccgcgcgggtcaatccgggcacccgggacacgatctcgggcggctgcagtccttggctcaacaagtccaaggccggccacagggtcccggtggcgtcgtcgtcctccagcgttgtgctctcggcgttccagacgcctcgacggaactccaccctgtccatcgagtaaggcaccatcatgaggcccggtgaaatgtggttggtcactttggctcctgtacagcctaggcttggacgcccacggtcatggtgtgggtcgcggtttggaaaatcccgtcgaggttgagtgcctgattgagttcgtcctcgtagaagcttgaggactcgactgaggcaagaccgagccccgtgcagaccaagttgatctgttgtgcgatcgccccgacttcttgaagggcgaacctcaaacccctggctccgtacttccgcatcgccctccacggcgagatgacgaacaccaagtgcactccggccgcatccgattgctccacggccggc

SEQ ID NO: 118 - DNA, 9859 bp, Propionibacterium acnes
  source 1..9859: mol_type = genomic DNA
ggggttttccttcatgttcctgattttatctgcccggtgtggcgttttcatctttgtgtgggtggttcgcctggggtcttggagtgtggtgacgcggtgatggtcacggtgacggtgactgtggcgcgtggcgggtgaggtggttctttcctggtctggtgtgtggcccaggtgagtgtggtgatgagggccagggtgaggatgatgaccagggtggggagtagtttgtctggccggtgtcgccgggcttggtggcgcggcatgtttttccagggtgtgtctccgaacaggtcgtcgtcggaggggtcgtcgtggttcatagggtggccttggcgatggtggtgggcgagtttggtccaggtgatggtgccgtcggaggcgatgtggcggtcggcgggcagggtgtggacggtccatccggcgtcggtgagggcggtggtgaaggatttcttgatggatcgtttgggtaggtcgatgggggcgtgggtgccgacccagatgcaccggtttttgaggtgggtggcgccgaggtggttcatgtcgcggaccatgttttgggtgagtgtgagggtgtcggggtcccattggacggggatgatgatgtggtctgcgatggtgatggcgtgttgccaggcggcgtcgaggtcgttgtttccggtgtcgaggatgatgacgtggaagcggcttcttagggcggtgatgatgcggtcgaggtcgtcggcggtggggggtgtgatgaggctgttgtggttgtcggtgatggtgggtaggcatgtgatggtggcccagccttctggttgccaggagatgtaggggccgaggtcgcggggttgggaggcgaatcctgggtgacgggctgcgcgggcgaggtcgatgacggtgttgtcggtgtggcggggtgcgcgggtggagagggtgccgcgtgggttgatttccacgacgacgatgtcgtcgtgtcctgctgtggtggcgagggcttgggcaaggatgacggccagcggggttttgccggtgccgcctttgaggttggcgagggtgatgatgtggtcggtgagttgggcgggtgcggcggtgtggtgagggttggcggtgaggttggcgatggtgaacagggcatcgagatcgtcggtggtgttctgctcggtgggttgggggtcgccggagatgatcgggtcggcgcggcgcggctgccatgccggcctcaccactgtcacgaccaccacgggtctgctggcgctgtgtgggtgtcgtcggcgatgactcacgatcggcagtctcaccatcgtctcggtgatgctcggctagcgctggacccggtcaagttcgggccggctcacccagtggtgatgactcggtcacagaaccgctgccggtcgttatctcggacgtctcgactcctccagtcctgatgggcgttggagccacctacacctactctcagaacgaccccgacctcgtgtggggcgggggcagatgtcacttgggccaatcgagagcccaggtgatggggaaagcaggggtgtgatatctgtcctggaaaactgggcagctgctaccgtggattgacggatctccacgaaagaagggaatgcgaccatgcagatcaccgtcaagaccatcaaagatcatcgggttcgcactgtccagaccgccatgagcagcgccttggggattggttcccaggtagacatgctcgcccccggcggttccaccagctcgagttccggttcatgctgctcgtgctcgacctgcgcggtagtggcgcagcctcaagactgaacggctggtcagccccaggggcgtggcgctcatcgcgtcacgccccttctattcgctggacagggtgcgcgagctgaggaacatcgcggtgtgtgcgatgacgaggggcaggagcaagtctgtgcgggttgccaagtagccctgcgcgatggccatcacgctggccccgacggcggcgaagacacctccgatacgtcgcttcatgccgccgaattgcatcaggacgaataggactcccgcggtccacatccctccgggcatgcatctgggaaagatgaaccggaagatgatctcttcacaggagagctggagtactagcagcgtagcccccacggggagactcacctctactgacagacggatcgtcttcatccacccacccgagctggcatcgaccatttcggtggccatgcgcgaccggtggcctcgtgcctctcgctgcgtgtcgatccagccgagcagtccgtggacgctctccgctaggactcctgacgcgacagtctcaccaattcctaagcccacggcgaggaccgcgacgcccccctgcacggcaggctgtgtgacttggtggtcccaccaacccgccggcaggaccatgcgtgcgaggctgcacacgagcaggaggtggagggtcacgacgagcgacatctggaataccgcttgccgttcggcgatggtggcgttgggaaagagcggtaggccggcacgggcagcggcgctcgacagcttccgcaagagcggtttggagacgaagtagtaggcgacgtacagcgccagcgctgtcgcgatgatgatcatcggtctgccaccgagctgacccgccgatagccgtttctgttccaccaatactggctgttgtagatcaggtggcccagaacacaggcccagatcccccagaagatgaacaggatagtccccaaggcggcgagcgggatcttggagaggacctgtccccgtccgaacaccgagtggccgcaagcaaacaagagtgctcccacagcggtgagcgcgagccaggccggggttgctcgcagactgatcaccgggaccccgacccggaagccgacctcttctcctacagcgatgactagcaactgccacagcggcatgttctgaacggagcgcgcgactcgggctcgagtcacccacacgggctgttgagcgctcacatcaccactcaggtaccccggtgaggcacttcgcttagtactggggcccgatgtgcgagcattcgtgatgtgtcgcaggatccggttgtcaagccaagaggccagcagggctccggcgacagtgacgggtagcccgatcagcacgaggccccagccatgcggtgccgagaggtttctggccggcgtgcacgcgaggcaggcaaatgccatcactgccagcactacgacgtagatggtcgcataattcgacttgcgggtgacgttgccgaccatcttggccaaagtcgctggggaccagctgatgagtgcgatggtggtcagcaggaagcaggaccagacagacatccggcgcactcaggggtatgggtgcggctgtgggttttggaaaccgccatatgcggcgtagcgggggtgtgcccgcatgggtgcgctgggcagtgacagggcgagcagcccaggcgcccagagcctgacacagtgcagtcccagcccctggatctctatggtggtgaaatcttcgatgtacaggggtgacacacaggtgatgctgttgaccacgctctttaccagttccgcccccgtgtgggtgtcgtcaggtggcaggtcttcggcttgggcaatggtgcccgcgtcgaatttcgccacaactgattgcgcggcctgatagttcctcgcgtagtaggagacgttcgagtcgaggtcaagcatgtcctccgtggacatactggacgcgtcggcctcggcgtcgaaagacgtccataccgcgagcatccgaaccccgctgcactcgagaaacgccttgtacatggctgcttccagacccgcgtctgcacctaggccgacggcgacgaggggaagttggttgccactaccgaccatcatgcatgccacggtgaaatgcttgagcccgggagtcggaagccagtagaaacgcagttcgtggcttcggcccgctgcacgttccacgagccgctggatgcgctggaggcggggtccttcgacgcggatgcgcacaggtgacgaggctccataccacaggcccatcgcggcatctacctggatcaattcataagccgcggacagcgttgcggcgacgcgtgaagtgtggacggcggtgccggtcgtcacggccgttcccagccacggctcaccgtcgtgccgacgggggttgtaacccaggtaaaagaactgcgccgggatccactcctgccgggaggtcccgacacggggagtcttgacccatgtcatgggcaagtcgtcgcgataggtgtcgaacgcacctccagccactcgttgcgcgaagccgaatgcgcccagatcgagaacttcgtcctcggtccgggcgaggagttcctgacgagtcgcccagcgccgttcgaagggactatggagaatcccggtacccgcgcagtagcgctcgacggcctccgcgtagaccttgatctctgcctcaaactcgttcagccccaccccaccgatgtggtagctacccggcttggggtcgggccggtcaagcagtgcgtgcatccccgtgagttccccaccgttcacccgcacgcgggggccgagcgcggggtgcagcgagtagccgacggaagtcaccagcccgcatagcgggctgtaggtgcgccgcctgagccgggctgcggtctcgacggggtcgctatcctggcgaagcttcatcgctcgccccctgccgccagccactcacggatgtcgtagtacaggtccggagcggtttcaacctgcgctggtgcatcaaaacgggacataggtaggacgtcgttgtaggcgatctccatcgtcggtatgtagaccgacaacactttgttgcgcgtcgtgttgaggccgttgcgggcgatgctgacagcctcatgcgcgacgtgcgcggccaagatcgcgcgcaccgacgctgccacggccggcgctccggcccttacgcggtcggcagcggccacccgcatccaggacaggtagctctgccgttcgcgcaggttcatcgcgacccgctgctcgaaggtccggtaggacgaggtcgcaccagggacgacgtagggacccacgtacaaggccggcccgtctacagctgcgtggagccacgacaggtgggcgcgtcgggcgaacaggtcaagggcgcgcagcatagccgggttgttctgcgccagcgctaccacaaggagtggctgcaggtccggcgccgaacccagcaacgccaacatctgggaggcctcctgctccatgtgcaactcgtcggccgactgctcaagccgcaggcctgcgaagagggtggctgatggctgcgtgtcgtcagcgaggacggtagcctgcagcccctctccctcgagaatctgctggatatcgccggcgaggagcgcgtcgtcgctgaatacccacaccgggcgcgtctctctacctccatccatcttgtcctcaacgttttcgaccagcgcaccgatcgatgctaggtgggccatcacgtcgtcaagggccgcgcgggtcaatccgggcacccgggacacgatctcgggcggctgcagtccttggctcaacaagtccaaggccggccacagggtcccggtggcgtcgtcgtcctccagcgttgtgctctcggcgttccagacgcctcgacggaactccaccctgtccatcgagtaaggcaccatcatgaggcccggtgaaatgtggttggtcactttggctcctgtacagcctaggcttggacgcccacggtcatggtgtgggtcgcggtttggaaaatcccgtcgaggttgagtgcctgattgagttcgtcctcgtagaagcttgaggactcgactgaggcaagaccgagccccgtgcagaccaagttgatctgttgtgcgatcgccccgacttcttgaagggcgaacctcaaacccctggctccgtacttccgcatcgccctccacggcgagatgacgaacaccaagtgcactccggccgcatccgattgctccacggccggctcgccggccatcgaattcctcacgccgcgacagccctcttcaccggtcacgggcaccagtcgatcgatgaccggcgagtagcggtagacgccgcgactcaagccggacacccgttgtgcggacatgaagatagacacgggatacagccctccaccagacgggacagcgcgtacattataccgcacgatatcaccgctcgaacgtgggacatccacgtgccccgtcacaccggcagcacctctcagaaacgcagctacgtcacgcaggtctagggattcgccggtgtagttccgtccgctgcgccggcgggcgatcacttgctcgaggggtgcgcgcaccctgctggacctgggaagttcgatcacatcggcagcgaacgtgtcgcgatccatctgtccgtacgtaacgatcatggggtcaacgaaatagtcgccgaccgagacgttgaactccatatccccccgggcgatgcgcgaggcgagcaagaagtctgcagctgcgttagacagccccggcccatcagtgttgtcgcagcggaactcgtgggtccgaaaccccacaccttccgtgcccgggctctgcgctcgatacgacgtgatcgcagaactagccttccttaaaccgcccggagtagctaccatgaccgtcccctctgaggtctcccgaacacttgcgacaatagcagcatgtgggggcagccgccagaggcgggcatccttgtctcgacaaccattgacctccggattcgatatgtgcataatcatagtcgtgccaacacgaaacgtgtacgtctcggaagacgacctagacctgttcgccgaagccaccgagatcgctggaggcctgtccgcagcggtgttggaggccttgcgcagctacgtagacaggcaccatcgcgcggccggcggattcgacgagatcgagctggagctgcagaacgacggtatcgaccaccgtgtcaccttcatgggtcgccgcctgatacacatccgccgtccagatcccgagggaacccgcatagacactgtctacttgaccgccaaacaccaattcgccgttgccaccaaaatccaacgacggctgccagactggacggccggccacgagcacatctggtccgacccggagacctggaatcgggagttctggatcgcaggtgacaagacgatggccgtgtatcccagccttgacaaactccgcgaagctgaccccaatgtggccgaacgcgccgaggccgcggtcaaaatcccgccgttcgaggtcctggacatctgatgacagaatcatcatcttcccggcggcaattggcaatgccggtgctgtcagtcacggatctagccaagaaatacgtggttcatggcggctacgaggtcccggcactcaacggtgtctcgtttgacctgcacccgggagagatgctgggtttgttcgggccaaacggtgctggaaagacgacgctggtcaggatcatcgcgggcctcttatcggcagattctggagacgtccactggggatcggatcaaggtcgggccaggttaggctacgtgtcccaaaagggtggactgcagtacgggctcacgtgccgggaagagatggtcttccacgcacaatgcttcggccagtccgccaagcaggcccggactagcgtcgacgaggtcgccgcgatgctgcactgcgattacctgatggagtgggacgtcggaaggctctccggtgggcaacgccgaatcatcgaggtagggctagcactcgtcaatcaaccatcggtcgtcctgctcgacgagcccaccctgggcctggaccccgcaacacgcctgtcgttgtggcaaacggtaaagtcggcacgccgtgagaccggtgctgccttcctcgtcaccacccactacattgacgaggtggccgagcacctgtccaacgtcagcgtgatcaaccacggaaccgtcgtcgccaacggctcgccagcgcacatccgagaaatgttcgcgaccggggaagtaacgctcggcgtggccgaggatacggtggacagtgcggtggacgtgttggctgggaccgcgttcgaggcgcaccccaccgaaaccgtcccggggatcgtggtcaggtccaggcatcccgacgtggacgcggccaagatcatcaccatcctggctggtcatggcatctcggtggactccatatccgtacgcgaggcgaccttggaagaggcgtttctcacgatcacaggcagtcgagacccggagaggcaaatcccatgaacacttgcttcaggcgatatgcggcgatgtcgctgagagcgcggcgtgatttggccctgacattcatccagcccctcgtctacctagccctcttcggaccgctcttcgtcacgacgatgaagatgtcgcagagagctaccgccgctacgggttactccctatacatcacgggcctgtccatccaaatggccatgacgatcggtgccttcgcggggctaaccatcatcctcgaataccgactcggcatcctcgaacggatctggagcacccccctcacggggagcaagatgatggcggggcgaatcgcgcgcgacgtcgttatgatgatgatgccgatactggtcgtcttcatcatcggcctggtgctgggaacacgccccagcccactgggcctggcgacctacttcgtgacagtgctcggcacaggagccacgttcgccggggtctcctacgcggtggcactcagaacgaagagcgaggcagcgctatccgcgatcttcaacctcatcctgctacccatcctcctgctgtcggggatcatgctgcccatgtcgttcgcaccacactggatcgccaccgctgcccacgtgaacccgttgtggtacctggtgcaaggcgcgcggaaccagttcagcgttctagggctcgtggcggcggccccatggagttgggctgtggccatcgtcatgtcagccgctgccttcggctgggcaagccacgaattcaacaagaggcgctgacacaaagaatggtgccgggaacccaggtccccggcaccaccgagtgcactcgcgacgtcaacgcaccgttgcggtcactgcgcaggtcgagcacgaggacgacgagcccgcgctgctgcaggtcgagccgccaggcgcgagcaggtcgacgttagcgtcggcgccgccgaagacggacgtgacggccggctgagaggtgcggatgcggtgctccagcgaggaggtggtggtgagtttcatgggaggtgctcctaggagtgagacgagaacaaaccctagcgataggttagcagtccgcaaccgactccgggaatagtagaagcgcgcatccgtagcggaagaccttagcctgattacagtgaccctgttcgcgtctcaacattattccacacccccgagcagcgaacgacaccgcgatgatgatccgtcgcctctccaccgaagaactccgcgcccacatcgcaccgggccgccgtcccgtgcatcagacctgccgtcaacgtcggccatgaagctgggaaggtggctctcgtctaggagcagacgcgggacgcctcctccaggttgggccggggaagtgtccggttcttgatgtaggtggcggtccctattgatgggcgttgaccgtgggaatgcggtcggcgaagggggtggcgaacccgttgagcgcaggcttccagcgcatgcatcaacgctgtctgccggccaccggcaagcctcacccgcccgtcatggccatcatcgaggtgccggtgaatcctcgacacatgatcccaactcccccggaggggcttccggggctgttcagccaccagatcagccaggcggcgagcccgactctgccacccggaccctgcagagcgtgcctgctgccgtcgtgtcgtgtcgggccagtgggccaccagatcggccacatccgtcttggcccatct

SEQ ID NO: 119 - DNA, 9540 bp, Propionibacterium acnes
  source 1..9540: mol_type = genomic DNA
cggtgtggcggggtgcgcgggtggagagggtgccgcgtgggttgatttccacgacgacgatgtcgtcgtgtcctgctgtggtggcgagggcttgggcaaggatgacggccagcggggttttgccggtgccgcctttgaggttggcgagggtgatgatgtggtcggtgagttgggcgggtgcggcggtgtggtgagggttggcggtgaggttggcgatggtgaacagggcatcgagatcgtcggtggtgttctgctcggtgggttgggggtcgccggagatgatcgggtcggcgcggcgcggctgccatgccggcctcaccactgtcacgaccaccacgggtctgctggcgctgtgtgggtgtcgtcggcgatgactcacgatcggcagtctcaccatcgtctcggtgatgctcggctagcgctggacccggtcaagttcgggccggctcacccagtggtgatgactcggtcacagaaccgctgccggtcgttatctcggacgtctcgactcctccagtcctgatgggcgttggagccacctacacctactctcagaacgaccccgacctcgtgtggggcgggggcagatgtcacttgggccaatcgagagcccaggtgatggggaaagcaggggtgtgatatctgtcctggaaaactgggcagctgctaccgtggattgacggatctccacgaaagaagggaatgcgaccatgcagatcaccgtcaagaccatcaaagatcatcgggttcgcactgtccagaccgccatgagcagcgccttggggattggttcccaggtagacatgctcgcccccggcggttccaccagctcgagttccggttcatgctgctcgtgctcgacctgcgcggtagtggcgcagcctcaagactgaacggctggtcagccccaggggcgtggcgctcatcgcgtcacgccccttctattcgctggacagggtgcgcgagctgaggaacatcgcggtgtgtgcgatgacgaggggcaggagcaagtctgtgcgggttgccaagtagccctgcgcgatggccatcacgctggccccgacggcggcgaagacacctccgatacgtcgcttcatgccgccgaattgcatcaggacgaataggactcccgcggtccacatccctccgggcatgcatctgggaaagatgaaccggaagatgatctcttcacaggagagctggagtactagcagcgtagcccccacggggagactcacctctactgacagacggatcgtcttcatccacccacccgagctggcatcgaccatttcggtggccatgcgcgaccggtggcctcgtgcctctcgctgcgtgtcgatccagccgagcagtccgtggacgctctccgctaggactcctgacgcgacagtctcaccaattcctaagcccacggcgaggaccgcgacgcccccctgcacggcaggctgtgtgacttggtggtcccaccaacccgccggcaggaccatgcgtgcgaggctgcacacgagcaggaggtggagggtcacgacgagcgacatctggaataccgcttgccgttcggcgatggtggcgttgggaaagagcggtaggccggcacgggcagcggcgctcgacagcttccgcaagagcggtttggagacgaagtagtaggcgacgtacagcgccagcgctgtcgcgatgatgatcatcggtctgccaccgagctgacccgccgatagccgtttctgttccaccaatactggctgttgtagatcaggtggcccagaacacaggcccagatcccccagaagatgaacaggatagtccccaaggcggcgagcgggatcttggagaggacctgtccccgtccgaacaccgagtggccgcaagcaaacaagagtgctcccacagcggtgagcgcgagccaggccggggttgctcgcagactgatcaccgggaccccgacccggaagccgacctcttctcctacagcgatgactagcaactgccacagcggcatgttctgaacggagcgcgcgactcgggctcgagtcacccacacgggctgttgagcgctcacatcaccactcaggtaccccggtgaggcacttcgcttagtactggggcccgatgtgcgagcattcgtgatgtgtcgcaggatccggttgtcaagccaagaggccagcagggctccggcgacagtgacgggtagcccgatcagcacgaggccccagccatgcggtgccgagaggtttctggccggcgtgcacgcgaggcaggcaaatgccatcactgccagcactacgacgtagatggtcgcataattcgacttgcgggtgacgttgccgaccatcttggccaaagtcgctggggaccagctgatgagtgcgatggtggtcagcaggaagcaggaccagacagacatccggcgcactcaggggtatgggtgcggctgtgggttttggaaaccgccatatgcggcgtagcgggggtgtgcccgcatgggtgcgctgggcagtgacagggcgagcagcccaggcgcccagagcctgacacagtgcagtcccagcccctggatctctatggtggtgaaatcttcgatgtacaggggtgacacacaggtgatgctgttgaccacgctctttaccagttccgcccccgtgtgggtgtcgtcaggtggcaggtcttcggcttgggcaatggtgcccgcgtcgaatttcgccacaactgattgcgcggcctgatagttcctcgcgtagtaggagacgttcgagtcgaggtcaagcatgtcctccgtggacatactggacgcgtcggcctcggcgtcgaaagacgtccataccgcgagcatccgaaccccgctgcactcgagaaacgccttgtacatggctgcttccagacccgcgtctgcacctaggccgacggcgacgaggggaagttggttgccactaccgaccatcatgcatgccacggtgaaatgcttgagcccgggagtcggaagccagtagaaacgcagttcgtggcttcggcccgctgcacgttccacgagccgctggatgcgctggaggcggggtccttcgacgcggatgcgcacaggtgacgaggctccataccacaggcccatcgcggcatctacctggatcaattcataagccgcggacagcgttgcggcgacgcgtgaagtgtggacggcggtgccggtcgtcacggccgttcccagccacggctcaccgtcgtgccgacgggggttgtaacccaggtaaaagaactgcgccgggatccactcctgccgggaggtcccgacacggggagtcttgacccatgtcatgggcaagtcgtcgcgataggtgtcgaacgcacctccagccactcgttgcgcgaagccgaatgcgcccagatcgagaacttcgtcctcggtccgggcgaggagttcctgacgagtcgcccagcgccgttcgaagggactatggagaatcccggtacccgcgcagtagcgctcgacggcctccgcgtagaccttgatctctgcctcaaactcgttcagccccaccccaccgatgtggtagctacccggcttggggtcgggccggtcaagcagtgcgtgcatccccgtgagttccccaccgttcacccgcacgcgggggccgagcgcggggtgcagcgagtagccgacggaagtcaccagcccgcatagcgggctgtaggtgcgccgcctgagccgggctgcggtctcgacggggtcgctatcctggcgaagcttcatcgctcgccccctgccgccagccactcacggatgtcgtagtacaggtccggagcggtttcaacctgcgctggtgcatcaaaacgggacataggtaggacgtcgttgtaggcgatctccatcgtcggtatgtagaccgacaacactttgttgcgcgtcgtgttgaggccgttgcgggcgatgctgacagcctcatgcgcgacgtgcgcggccaagatcgcgcgcaccgacgctgccacggccggcgctccggcccttacgcggtcggcagcggccacccgcatccaggacaggtagctctgccgttcgcgcaggttcatcgcgacccgctgctcgaaggtccggtaggacgaggtcgcaccagggacgacgtagggacccacgtacaaggccggcccgtctacagctgcgtggagccacgacaggtgggcgcgtcgggcgaacaggtcaagggcgcgcagcatagccgggttgttctgcgccagcgctaccacaaggagtggctgcaggtccggcgccgaacccagcaacgccaacatctgggaggcctcctgctccatgtgcaactcgtcggccgactgctcaagccgcaggcctgcgaagagggtggctgatggctgcgtgtcgtcagcgaggacggtagcctgcagcccctctccctcgagaatctgctggatatcgccggcgaggagcgcgtcgtcgctgaatacccacaccgggcgcgtctctctacctccatccatcttgtcctcaacgttttcgaccagcgcaccgatcgatgctaggtgggccatcacgtcgtcaagggccgcgcgggtcaatccgggcacccgggacacgatctcgggcggctgcagtccttggctcaacaagtccaaggccggccacagggtcccggtggcgtcgtcgtcctccagcgttgtgctctcggcgttccagacgcctcgacggaactccaccctgtccatcgagtaaggcaccatcatgaggcccggtgaaatgtggttggtcactttggctcctgtacagcctaggcttggacgcccacggtcatggtgtgggtcgcggtttggaaaatcccgtcgaggttgagtgcctgattgagttcgtcctcgtagaagcttgaggactcgactgaggcaagaccgagccccgtgcagaccaagttgatctgttgtgcgatcgccccgacttcttgaagggcgaacctcaaacccctggctccgtacttccgcatcgccctccacggcgagatgacgaacaccaagtgcactccggccgcatccgattgctccacggccggctcgccggccatcgaattcctcacgccgcgacagccctcttcaccggtcacgggcaccagtcgatcgatgaccggcgagtagcggtagacgccgcgactcaagccggacacccgttgtgcggacatgaagatagacacgggatacagccctccaccagacgggacagcgcgtacattataccgcacgatatcaccgctcgaacgtgggacatccacgtgccccgtcacaccggcagcacctctcagaaacgcagctacgtcacgcaggtctagggattcgccggtgtagttccgtccgctgcgccggcgggcgatcacttgctcgaggggtgcgcgcaccctgctggacctgggaagttcgatcacatcggcagcgaacgtgtcgcgatccatctgtccgtacgtaacgatcatggggtcaacgaaatagtcgccgaccgagacgttgaactccatatccccccgggcgatgcgcgaggcgagcaagaagtctgcagctgcgttagacagccccggcccatcagtgttgtcgcagcggaactcgtgggtccgaaaccccacaccttccgtgcccgggctctgcgctcgatacgacgtgatcgcagaactagccttccttaaaccgcccggagtagctaccatgaccgtcccctctgaggtctcccgaacacttgcgacaatagcagcatgtgggggcagccgccagaggcgggcatccttgtctcgacaaccattgacctccggattcgatatgtgcataatcatagtcgtgccaacacgaaacgtgtacgtctcggaagacgacctagacctgttcgccgaagccaccgagatcgctggaggcctgtccgcagcggtgttggaggccttgcgcagctacgtagacaggcaccatcgcgcggccggcggattcgacgagatcgagctggagctgcagaacgacggtatcgaccaccgtgtcaccttcatgggtcgccgcctgatacacatccgccgtccagatcccgagggaacccgcatagacactgtctacttgaccgccaaacaccaattcgccgttgccaccaaaatccaacgacggctgccagactggacggccggccacgagcacatctggtccgacccggagacctggaatcgggagttctggatcgcaggtgacaagacgatggccgtgtatcccagccttgacaaactccgcgaagctgaccccaatgtggccgaacgcgccgaggccgcggtcaaaatcccgccgttcgaggtcctggacatctgatgacagaatcatcatcttcccggcggcaattggcaatgccggtgctgtcagtcacggatctagccaagaaatacgtggttcatggcggctacgaggtcccggcactcaacggtgtctcgtttgacctgcacccgggagagatgctgggtttgttcgggccaaacggtgctggaaagacgacgctggtcaggatcatcgcgggcctcttatcggcagattctggagacgtccactggggatcggatcaaggtcgggccaggttaggctacgtgtcccaaaagggtggactgcagtacgggctcacgtgccgggaagagatggtcttccacgcacaatgcttcggccagtccgccaagcaggcccggactagcgtcgacgaggtcgccgcgatgctgcactgcgattacctgatggagtgggacgtcggaaggctctccggtgggcaacgccgaatcatcgaggtagggctagcactcgtcaatcaaccatcggtcgtcctgctcgacgagcccaccctgggcctggaccccgcaacacgcctgtcgttgtggcaaacggtaaagtcggcacgccgtgagaccggtgctgccttcctcgtcaccacccactacattgacgaggtggccgagcacctgtccaacgtcagcgtgatcaaccacggaaccgtcgtcgccaacggctcgccagcgcacatccgagaaatgttcgcgaccggggaagtaacgctcggcgtggccgaggatacggtggacagtgcggtggacgtgttggctgggaccgcgttcgaggcgcaccccaccgaaaccgtcccggggatcgtggtcaggtccaggcatcccgacgtggacgcggccaagatcatcaccatcctggctggtcatggcatctcggtggactccatatccgtacgcgaggcgaccttggaagaggcgtttctcacgatcacaggcagtcgagacccggagaggcaaatcccatgaacacttgcttcaggcgatatgcggcgatgtcgctgagagcgcggcgtgatttggccctgacattcatccagcccctcgtctacctagccctcttcggaccgctcttcgtcacgacgatgaagatgtcgcagagagctaccgccgctacgggttactccctatacatcacgggcctgtccatccaaatggccatgacgatcggtgccttcgcggggctaaccatcatcctcgaataccgactcggcatcctcgaacggatctggagcacccccctcacggggagcaagatgatggcggggcgaatcgcgcgcgacgtcgttatgatgatgatgccgatactggtcgtcttcatcatcggcctggtgctgggaacacgccccagcccactgggcctggcgacctacttcgtgacagtgctcggcacaggagccacgttcgccggggtctcctacgcggtggcactcagaacgaagagcgaggcagcgctatccgcgatcttcaacctcatcctgctacccatcctcctgctgtcggggatcatgctgcccatgtcgttcgcaccacactggatcgccaccgctgcccacgtgaacccgttgtggtacctggtgcaaggcgcgcggaaccagttcagcgttctagggctcgtggcggcggccccatggagttgggctgtggccatcgtcatgtcagccgctgccttcggctgggcaagccacgaattcaacaagaggcgctgacacaaagaatggtgccgggaacccaggtccccggcaccaccgagtgcactcgcgacgtcaacgcaccgttgcggtcactgcgcaggtcgagcacgaggacgacgagcccgcgctgctgcaggtcgagccgccaggcgcgagcaggtcgacgttagcgtcggcgccgccgaagacggacgtgacggccggctgagaggtgcggatgcggtgctccagcgaggaggtggtggtgagtttcatgggaggtgctcctaggagtgagacgagaacaaaccctagcgataggttagcagtccgcaaccgactccgggaatagtagaagcgcgcatccgtagcggaagaccttagcctgattacagtgaccctgttcgcgtctcaacattattccacacccccgagcagcgaacgacaccgcgatgatgatccgtcgcctctccaccgaagaactccgcgcccacatcgcaccgggccgccgtcccgtgcatcagacctgccgtcaacgtcggccatgaagctgggaaggtggctctcgtctaggagcagacgcgggacgcctcctccaggttgggccggggaagtgtccggttcttgatgtaggtggcggtccctattgatgggcgttgaccgtgggaatgcggtcggcgaagggggtggcgaacccgttgagcgcaggcttccagcgcatgcatcaacgctgtctgccggccaccggcaagcctcacccgcccgtcatggccatcatcgaggtgccggtgaatcctcgacacatgatcccaactcccccggaggggcttccggggctgttcagccaccagatcagccaggcggcgagcccgactctgccacccggaccctgcagagcgtgcctgctgccgtcgtgtcgtgtcgggccagtgggccaccagatcggccacatccgtcttggcccatctccagcccgccagacccagggaggccatcacctcatcgacgccgcgccgggtggtctcatcaaccccgtcaaacagctcgggccacctcgatgatgccgtccgtgaacgatccagattcatgacatgctcctcttcacagatgccgacgacgatcaggccgtggccgtggcaacggggtgacctgccggcgcggctcacgacgttgagccggaaccacacgagacgcaccagtgtgctgcgccgtcttgagtcgggcgctgtactgggccctggcgctgtggtgaacagcccgacgaagcaccgaccgccggctgtcctcatcgccagggcgaggcatggggcgcggcatggtgcgcccggtagcagcatccatgagggtgatccggtcagccaaaatgccgagccggttttcccacttccggggccacggcaccagcaggtcacgctgacagcccacgccgtggcgtcggcagtccacaacattttctcacggccaggatgcgagtgcagcagctccaccggaacaccagcatcacgcacccgccgcatcgtgacctcatcctcacg

SEQ ID NO: 120 - DNA, 1583 bp, Propionibacterium acnes
  source 1..1583: mol_type = genomic DNA
accagatcggccacatccgtcttggcccatctccagcccgccagacccagggaggccatcacctcatcgacgccgcgccgggtggtctcatcaaccccgtcaaacagctcgggccacctcgatgatgccgtccgtgaacgatccagattcatgacatgctcctcttcacagatgccgacgacgatcaggccgtggccgtggcaacggggtgacctgccggcgcggctcacgacgttgagccggaaccacacgagacgcaccagtgtgctgcgccgtcttgagtcgggcgctgtactgggccctggcgctgtggtgaacagcccgacgaagcaccgaccgccggctgtcctcatcgccagggcgaggcatggggcgcggcatggtgcgcccggtagcagcatccatgagggtgatccggtcagccaaaatgccgagccggttttcccacttccggggccacggcaccagcaggtcacgctgacagcccacgccgtggcgtcggcagtccacaacattttctcacggccaggatgcgagtgcagcagctccaccggaacaccagcatcacgcacccgccgcatcgtgacctcatcctcacgctgccgatcaccgtcaaccagatggtcagccacgatggtgttcacaccccatgactcatgcagttgcctggccaaggcgcccaacacctgctgacgcacctgtgacttgacgtcatcatcctccagatcctgtgtaccaaccatcacggaggccaacacatcactgcgttgctgaaccagggtgttgacgacgtcgacatcgtcgatacccatgggattgttggcgcgcgcggccacggcatgaaacgtgttggactgcaaattctcgaccagaccacgccgatagtcgttgaactgggaggtgtcggcaatgacaccggtcatgatgtaggccgacccctcggacaaggccctgtaggactcgtcgacgaacgccaccaaccccggccgccgccggtaaagtcgacctgcttcctcgtcagccagcaaccatgacagtttttgccccatatgtcctccttgctgacatgacctcgaacatggtaaactttccgtaggaaaaacggggcaagtactttcgagcggctacctcggcccccggtgggctgtccagccttgtgcggaccgaagccgggggattccttatgtttgcggcaatgatgccgctgcaccccctcatgccgtggtgtggtcctttccccgtgtgcggtgtggtgcgtcgttgactggtttgtggccccgagccttactctgaccggtaggagaacggtgtggggtctacggatagcccactcggctcccggtggaatgtccaacagggtagggttgatgagttggtccatcaggaccgtcccggtggctgcgtcaatgatcgatatttcgatgatgcgcccgtccaggtcggtggtttcggtgtcgaggatgactccgactccgggttctaggagttggggatccaatgggtggtcatcgtgtggctcctacagggagtgtctgggctggacagcggtgcaatacccgcgccatagcggttttttctgcggg

SEQ ID NO: 121 - DNA, 6610 bp, Propionibacterium acnes
  source 1..6610: mol_type = genomic DNA
gtgttccagtgcctcgcgggcgtgatgttcttcttcggcaccttcttgccacatgcttcgcgcttcagcctcgccatccaagcgaacctggactgtgaacgagtcctcatcgggtccgtcctcattccacgcggcaatgatcccacgggcctcgtctgcgacctgactcaacttcatcgcctgcccgacagccccgagagccggaatctcgaacacccagatattcgcctcagccgagacctcacgatgggcgatcacttcgtaggtcgtctcaccttctactgtcgtgtccattacttccactccttcggaattttcacgcctgctcgctccagctgtgccaggacaccaactgacgtcagctggtgtcctgctggtatcgatacgcgcccggctccgccggggcgtccccagatttcatggcttcccttggcgttccgcagacgggcccatccttgagaacggagcagcttgaggacgtccttagttttctgcggtttcacacatcatagtatagccccacttaacttgtaaactaagcccctgtttacattttagttggtgcatgtgatccctgctcttatgacgtcgcccgacctggcgccttagacatgcactgttcatcctcaaccacactcaccgtcacgggtccgaaggcgaggtctatcaccattcgcatcgatgaagttgaagcaggatcgtccgcatcacgcactgccgatccggacagacgccaccggccgtaccgactgtttacgatctgccaccgcagactgctgccataaccgctatcacctctgatagtacgtttagtactatcagaggtgattcaagattctcctgtcgagcagccctacagtcacgaagtcctgcgatcgtcatcgcttaaggcagacggatggccatcggggaccactcgcaaagcaggggcgatcagcaacagtgatgtgccatgagcaagtactggtgcaccggctgtttactccgcccctagataaaccacgggtgcaggggtggacaccacaccatgaccgatgtggtgcccaccccatggctcacaggcaggccctatcgccgggagcactgctgcagatgaggctcagtaacctgccatgtctcacctggggccaaggtgccaagctccccacggaatctcaggcatcggaaaccagcagccgaacttccacagcatgagcgccctacgaaaaagcaggccgccgacggttctcaagaactcgccggcggcctgcatcgccactcgaactgtaaccgtggtccgaccccgtgcacaggtaagctccacactcccaccaggcatggccgaggcagtaccaagttgccgtggcccatcggcagatttggttaaattttgaaaagtcatatagactccttctgtaaatttttaaatctcataggactctcgccatcgccagccagcttcgacaggagtcccgatgtttcaccgagtgaaatatcggcaccgtttgagttgacctaaagctcaaaagatgctagaatccatcttacctcgttaggggcgttttgtcaaacgcccctatattgcgtgtcttcgcgcgtcgtagcgctgatgctgcgcctgtgtcgactatccgtttgtaagtactttcgatgacaccagcagtggctactcatgactggtgcgtgcgggtctaaagcagcagggaaaggaatcgcagtagaagccgcttgattcctatcacccctgatggtactatcagtactaacagagcagggcttactcgatgcgtgagaatcggggacatgctgagcctctcgtaggtcattggcctgctgggcgtcagtgtggcgcggttcgatccagtgaactctatcagctctgttagtactgtcagagttgatatattcgaccccaggaggagcccatgagttacatcgttcgcaccggaaatttggtcgacacccccgagctgcgtgagggagagcatggcccgtacacctacgctcgcgtcatcgtgtccgatcgcattcgccaggaggacggcagctacgtcaacgggccagcgatcgcctacgacgtcttggcgggtggcagccaagccgtgaatctggttgaagccgccaaggcgagcggcaacatccgcatcatgttcgcgggccgttaccgcgtcaccgagtggcggggtgagcagggcactcgtatccagcatgaggtccgagccgacgaagtgagcgtgagcctgctcggtcagagggtgaccgtggagcggcctcgaggtgacgtggcatccaaggagagcacgtcgttctgattgagtccgggggcacggtggtcgccgtggtaaaccgtgcccctgacagtactattgacactattggaggtatcagtgtgactgctcaaattttcgccttgtgcaaccagaagggtggcgtcggaaagtcgacatcgacgtttcatctggcccgtgccgcggtgttgcgtggccagcgtgtgcttgtcgtcgacaacgacccccagggcaacctgacgtctgtcgcggccgccgagcccgtgggggaggatcaggcggggctggccgatgtgctcagcgcgcgtgctccagagaccctccgcgatgtgatcgtgccgggaatctggtctggcctcgatgtcgtgccgacgtctggcatcacgctcggctgggtgcgtgacgaactcgtgatcgccggtgccggccgagaaggccggctgcgggaggccctggccggcgtcgaggacgactacgacgtgatcctgatcgactgtgctccatcgctcgatcagctcacgatcaacggcctggtggccgcccagggtgtcatcgtcgtgacgcactcgaagttgtggagcgccaacggcctcgcccagctgctcgacaccatcgacagcgtgcgcagctactacaacggcgcgctgcgcgtggcgggcatcatcgtcaaccagcacgaggagaacaccatcagcgggaaaacctggctcgacgagctgcatcaggctgccgagtcccggaagctgaccgtgcttgacccgccgatccccaagcgtgtcgtcatcgccgataccgtcgaggccgcgcgcggtctcgacgagtggggaagtgccgaggcggccgcgctcggccagttgtacgcccaccacctgacctgcatcgaaggagccctgtgatgacccgtccagccccccgaaagtcctcattgagcggatcaactccggtcgccccgccggctcagacggcgccggcaccgtctgccgcacctaccccccacaaggccgatgagtcacagacgagcagcaccacgaggaagtggcggcacaaggtgtcgttctaccaggacccggccgacaccgaccgggtgcgcggggcgatcctttacacgatgacgaccgagggcaaccggaacctgagccagttcgtcaacgatgccgtcatggccaaggtggtcgagctggaagtcaagtacaacgatggccagccattccccgctgtgggagcccgaggactaccccagggcggtgcagccgccgccggtgagtagaggaccatcgaccgtcgggggcttcaccatgcccccgaccctcggtcatcctgatcctcttgtcgatggtggtgacagtgggggattcacgcctcgttcagatcagaggaagtctcaccgcgtgattagtactatcaaatctgacagtactaacagagcagatagggttccctaggtcgagctgtatcacgccgacaaccagtgagccagtgatctacgaggggcgcaatatgcacccgatcggtagccgcgaaggcctcgccctgccccgatagtactatcaccactatcaatggtgctagtggtgagtttcttccattgatgacaacagcacagtgctgccgtctgtgtgcgggccaccagcccgcacacagttgccgtcgaggacgttgttcatgctctgtggtggccggtcctgagggcggctcgcaggatctcccggcgctcacggcgacgagcctggtagccaaggtctgcatgttcggcggcgagacgggctttgagggttgcggcttctgcacggcggtggagttggtcgtcgatgagttgggcgcgggccagacgccgcttatgggggttgtcgtgggtgaggggggcgtcgaggctgccgtcgtgggttagggccagggctgctcgttcggcgtcgtcgaggccgatgtggtggacggtcacgggtgcggtggtgacgtcgaggatgtccaggtggatgttgtggccgccgccgggggcttcggggaagtctggtgggctggcctggccggtgtcggggtcataccaggacaggccgatgatctcggcccagggtgggggcgggcagacggctcgcagaagggtgtgggccaggaacgtgttgcgggccatgatgcctccaagggtgaaaagcagtcgagtagcgatgacggcggggtagccgtctgctgggctgaggccgaccgggcccatgtcctcgatgctcttgtgctgcggccataccccaaagctaccaaacagtctttttaatctcaaagatacaaacagtgcttgacatattatctgcagcgaaagatactttcatcatggtggctgatcatgattacgcgactcctgacgatgagtggatgacacctcctcaggtggcccgtgtgattccgaacaccactgctcaggctgtccggcgctgggctgaggagggtcagcttcctggggcgtttcgtactccttctgggcgttggcatattccgtggtcggctgtggtgggcatcatggggtttgatccgcgtgagtccgcatcaccgagtgatcgtcaccagagctgacagagtcgtcgatgagctttcgagtgcagagctgatggcacgacggtctggatacttgtggagatgagagacgaccacatccagtcatggtcggggtacaccgaggggcagattcagcagtgctggcacgatgaggttgcccctgccattgactcgctcatggagcaggtaaggtctgttgccgagactcctgtgccgccgggttcgagattttacggcgatgagcagtgggccaagccttttcatccgtctactgcgatctgcggttcaatgggtccgccagcgatcacttgcacgcgctgaagctcctcgtctgggaagcgaacgtccaccatgtctatgcgccgtacacccttgctcgtgcatctattgaggcatcgtctactgctgtgtggctgttgagcacgaagacgcgcggagaacgtgtgctgcgagccttgcgatggtacgcgcaggattgtcacgactcgtgcaggttcatggatgatgagcagtatcgtgaccacctattgcggcgcattgaggggactgtcgctgcgggaaatctcgactcgcgcgctgctaggaaacggtaccgtgcaaccgatgttgtcgatgaggctgatcagctggttcccggaactctgagggcgtggcgagctttttctggtatggcccattcccgtatgtgggcatccagggggctgctcgacatggaagtgctgtccagtggccaaggaatggttacggcgaaggtgacgagcggatcggcccaaatcctttgggccgtcgtggcagctctgaatgttgctctcagtgccgctcgcttgtggcgtgattcgatgtgctcaccgtttgctgttgcccagtcggtagacgcgatgccagaggcgtttcgccgccctgtttagggtctgatcggggtagtgggtgttcacggggtcccaggttggccatggggcggcttggtgatgtgagttgggttgtgtggcagcctgggtgttgggtgtggcttcgttggccacgaaggcatgctcttccttgtgctgggacttgagtccccagtgctctcccctttgctagtggggggtggggtccccggaggtaggtcctccggggactttttctatgtctgtccgtgccccaggatttcgtatctaggcagtaccaattttgggttagttggaggtttctttggtaatggacagggtgagggtgatgaagaggtggccgtccttggtggcagaaattttctcgaacttcagctgaatgttgttatcagccactatctgttgggcggtgaggtgctcggagagcttctggaatccttcgcggatccacaggttgtaggggttggtgaccgagaccgaagggtatgggtcgaccttcagcgtcaggactggctggtctgggttgagggagttgatcttcaccagtttggggtaccggtcgcactcatgtgtctcttgtgttgggggccagcagtcgggggcccattcctcccagtggtcacgcatctcacgaagtactttcctgcatctcagcctctgcaggagctcgcgcgccaccgatgggagggctgccatgatgagggcaaggactgcgaacccgatgatgtaattgaccgtgtccctcgtcacgccgttcttgccgaggattccgatggcgaacgcgatgacgacaccgcccaggcacaggtgcatggggtcatgctgtgatggtttttcttcttcagcgactggtggggctatagtcatgtgtgccccttagtactaagtgatactggtgggttgcttttcccc

SEQ ID NO: 122 - DNA, 4467 bp, Propionibacterium acnes
  source 1..4467: mol_type = genomic DNA
cgcgcgcggtctcgacgagtggggaagtgccgaggcggccgcgctcggccagttgtacgcccaccacctgacctgcatcgaaggagccctgtgatgacccgtccagccccccgaaagtcctcattgagcggatcaactccggtcgccccgccggctcagacggcgccggcaccgtctgccgcacctaccccccacaaggccgatgagtcacagacgagcagcaccacgaggaagtggcggcacaaggtgtcgttctaccaggacccggccgacaccgaccgggtgcgcggggcgatcctttacacgatgacgaccgagggcaaccggaacctgagccagttcgtcaacgatgccgtcatggccaaggtggtcgagctggaagtcaagtacaacgatggccagccattccccgctgtgggagcccgaggactaccccagggcggtgcagccgccgccggtgagtagaggaccatcgaccgtcgggggcttcaccatgcccccgaccctcggtcatcctgatcctcttgtcgatggtggtgacagtgggggattcacgcctcgttcagatcagaggaagtctcaccgcgtgattagtactatcaaatctgacagtactaacagagcagatagggttccctaggtcgagctgtatcacgccgacaaccagtgagccagtgatctacgaggggcgcaatatgcacccgatcggtagccgcgaaggcctcgccctgccccgatagtactatcaccactatcaatggtgctagtggtgagtttcttccattgatgacaacagcacagtgctgccgtctgtgtgcgggccaccagcccgcacacagttgccgtcgaggacgttgttcatgctctgtggtggccggtcctgagggcggctcgcaggatctcccggcgctcacggcgacgagcctggtagccaaggtctgcatgttcggcggcgagacgggctttgagggttgcggcttctgcacggcggtggagttggtcgtcgatgagttgggcgcgggccagacgccgcttatgggggttgtcgtgggtgaggggggcgtcgaggctgccgtcgtgggttagggccagggctgctcgttcggcgtcgtcgaggccgatgtggtggacggtcacgggtgcggtggtgacgtcgaggatgtccaggtggatgttgtggccgccgccgggggcttcggggaagtctggtgggctggcctggccggtgtcggggtcataccaggacaggccgatgatctcggcccagggtgggggcgggcagacggctcgcagaagggtgtgggccaggaacgtgttgcgggccatgatgcctccaagggtgaaaagcagtcgagtagcgatgacggcggggtagccgtctgctgggctgaggccgaccgggcccatgtcctcgatgctcttgtgctgcggccataccccaaagctaccaaacagtctttttaatctcaaagatacaaacagtgcttgacatattatctgcagcgaaagatactttcatcatggtggctgatcatgattacgcgactcctgacgatgagtggatgacacctcctcaggtggcccgtgtgattccgaacaccactgctcaggctgtccggcgctgggctgaggagggtcagcttcctggggcgtttcgtactccttctgggcgttggcatattccgtggtcggctgtggtgggcatcatggggtttgatccgcgtgagtccgcatcaccgagtgatcgtcaccagagctgacagagtcgtcgatgagctttcgagtgcagagctgatggcacgacggtctggatacttgtggagatgagagacgaccacatccagtcatggtcggggtacaccgaggggcagattcagcagtgctggcacgatgaggttgcccctgccattgactcgctcatggagcaggtaaggtctgttgccgagactcctgtgccgccgggttcgagattttacggcgatgagcagtgggccaagccttttcatccgtctactgcgatctgcggttcaatgggtccgccagcgatcacttgcacgcgctgaagctcctcgtctgggaagcgaacgtccaccatgtctatgcgccgtacacccttgctcgtgcatctattgaggcatcgtctactgctgtgtggctgttgagcacgaagacgcgcggagaacgtgtgctgcgagccttgcgatggtacgcgcaggattgtcacgactcgtgcaggttcatggatgatgagcagtatcgtgaccacctattgcggcgcattgaggggactgtcgctgcgggaaatctcgactcgcgcgctgctaggaaacggtaccgtgcaaccgatgttgtcgatgaggctgatcagctggttcccggaactctgagggcgtggcgagctttttctggtatggcccattcccgtatgtgggcatccagggggctgctcgacatggaagtgctgtccagtggccaaggaatggttacggcgaaggtgacgagcggatcggcccaaatcctttgggccgtcgtggcagctctgaatgttgctctcagtgccgctcgcttgtggcgtgattcgatgtgctcaccgtttgctgttgcccagtcggtagacgcgatgccagaggcgtttcgccgccctgtttagggtctgatcggggtagtgggtgttcacggggtcccaggttggccatggggcggcttggtgatgtgagttgggttgtgtggcagcctgggtgttgggtgtggcttcgttggccacgaaggcatgctcttccttgtgctgggacttgagtccccagtgctctcccctttgctagtggggggtggggtccccggaggtaggtcctccggggactttttctatgtctgtccgtgccccaggatttcgtatctaggcagtaccaattttgggttagttggaggtttctttggtaatggacagggtgagggtgatgaagaggtggccgtccttggtggcagaaattttctcgaacttcagctgaatgttgttatcagccactatctgttgggcggtgaggtgctcggagagcttctggaatccttcgcggatccacaggttgtaggggttggtgaccgagaccgaagggtatgggtcgaccttcagcgtcaggactggctggtctgggttgagggagttgatcttcaccagtttggggtaccggtcgcactcatgtgtctcttgtgttgggggccagcagtcgggggcccattcctcccagtggtcacgcatctcacgaagtactttcctgcatctcagcctctgcaggagctcgcgcgccaccgatgggagggctgccatgatgagggcaaggactgcgaacccgatgatgtaattgaccgtgtccctcgtcacgccgttcttgccgaggattccgatggcgaacgcgatgacgacaccgcccaggcacaggtgcatggggtcatgctgtgatggtttttcttcttcagcgactggtggggctatagtcatgtgtgccccttagtactaagtgatactggtgggttgcttttccccggtggccgtgtgcaagacggccaccggggttttccttcatgttcctgattttatctgcccggtgtggcgttttcatctttgtgtgggtggttcgcctggggtcttggagtgtggtgacgcggtgatggtcacggtgacggtgactgtggcgcgtggcgggtgaggtggttctttcctggtctggtgtgtggcccaggtgagtgtggtgatgagggccagggtgaggatgatgaccagggtggggagtagtttgtctggccggtgtcgccgggcttggtggcgcggcatgtttttccagggtgtgtctccgaacaggtcgtcgtcggaggggtcgtcgtggttcatagggtggccttggcgatggtggtgggcgagtttggtccaggtgatggtgccgtcggaggcgatgtggcggtcggcgggcagggtgtggacggtccatccggcgtcggtgagggcggtggtgaaggatttcttgatggatcgtttgggtaggtcgatgggggcgtgggtgccgacccagatgcaccggtttttgaggtgggtggcgccgaggtggttcatgtcgcggaccatgttttgggtgagtgtgagggtgtcggggtcccattggacggggatgatgatgtggtctgcgatggtgatggcgtgttgccaggcggcgtcgaggtcgttgtttccggtgtcgaggatgatgacgtggaagcggcttcttagggcggtgatgatgcggtcgaggtcgtcggcggtggggggtgtgatgaggctgttgtggttgtcggtgatggtgggtaggcatgtgatggtggcccagccttctggttgccaggagatgtaggggccgaggtcgcggggttgggaggcgaatcctgggtgacgggctgcgcgggcgaggtcgatgacggtgttgtcggtgtggcggggtg

SEQ ID NO: 123 - DNA, 3927 bp, Propionibacterium acnes
  source 1..3927: mol_type = genomic DNA
gtgttccagtgcctcgcgggcgtgatgttcttcttcggcaccttcttgccacatgcttcgcgcttcagcctcgccatccaagcgaacctggactgtgaacgagtcctcatcgggtccgtcctcattccacgcggcaatgatcccacgggcctcgtctgcgacctgactcaacttcatcgcctgcccgacagccccgagagccggaatctcgaacacccagatattcgcctcagccgagacctcacgatgggcgatcacttcgtaggtcgtctcaccttctactgtcgtgtccattacttccactccttcggaattttcacgcctgctcgctccagctgtgccaggacaccaactgacgtcagctggtgtcctgctggtatcgatacgcgcccggctccgccggggcgtccccagatttcatggcttcccttggcgttccgcagacgggcccatccttgagaacggagcagcttgaggacgtccttagttttctgcggtttcacacatcatagtatagccccacttaacttgtaaactaagcccctgtttacattttagttggtgcatgtgatccctgctcttatgacgtcgcccgacctggcgccttagacatgcactgttcatcctcaaccacactcaccgtcacgggtccgaaggcgaggtctatcaccattcgcatcgatgaagttgaagcaggatcgtccgcatcacgcactgccgatccggacagacgccaccggccgtaccgactgtttacgatctgccaccgcagactgctgccataaccgctatcacctctgatagtacttttagtactatcagaggtgattcaagattctcctgtcgagcagccctacagtcacgaagtcctgcgatcgtcatcgcttaaggtagacggatggccatcggggaccactcgcaaagcaggggcgatcagcaacagtgatgtgccatgagcaagtactggtgcaccggctgtttactccgcccctagataaaccacgggtgcaggggtggacaccacaccatgaccgatgtggtgcccaccccatggctcacaggcaggccctatcgccgggagcactgctgcagatgaggctcagtaacctgccatgtctcacctggggccaaggtgccaagctccccacggaatctcaggcatcggaaaccagcagccgaacttccacagcatgagcgccctacgaaaaagcaggccgccgacggttctcaagaactcgccggcggcctgcatcgccactcgaactgtaaccgtggtccgaccccgtgcacaggtaagctccacactcccaccaggcatggccgaggcagtaccaagttgccgtggcccatcggcagatttggttaaattttgaaaagtcatatagactccttctgtaaatttttaaatctcataggactctcgccatcgccagccagcttcgacaggagtcccgatgtttcaccgagtgaaatatcggcaccgtttgagttgacctaaagctcaaaagatgctagaatccatcttacctcgttaggggcgttttgtcaaacgcccctatattgcgtgtcttcgcgcgtcgtagcgctgatgctgcgcctgtgtcgactatccgtttgtaagtactttcgatgacaccagcagtggctactcatgactggtgcgtgcgggtctaaagcagcagggaaaggaatcgcagtagaagccgcttgattcctatcacccctgatggtactatcagtactaacagagcagggcttactcgatgcgtgagaatcggggacatgctgagcctctcgtaggtcattggcctgctgggcgtcagtgtggcgcggttcgatccagtgaactctatcagctctgttagtactgtcagagttgatatattcgaccccaggaggagcccatgagttacatcgttcgcaccggaaatttggtcgacacccccgagctgcgtgagggagagcatggcccgtacacctacgctcgcgtcatcgtgtccgatcgcattcgccaggaggacggcagctacgtcaacgggccagcgatcgcctacgacgtcttggcgggtggcagccaagccgtgaatctggttgaagccgccaaggcgagcggcaacatccgcatcatgttcgcgggccgttaccgcgtcaccgagtggcggggtgagcagggcactcgtatccagcatgaggtccgagccgacgaagtgagcgtgagcctgctcggtcagagggtgaccgtggagcggcctcgaggtgacgtggcatccaaggagagcacgtcgttctgattgagtccgggggcacggtggtcgccgtggtaaaccgtgcccctgacagtactattgacactattggaggtatcagtgtgactgctcaaattttcgccttgtgcaaccagaagggtggcgtcggaaagtcgacatcgacgtttcatctggcccgtgccgcggtgttgcgtggccagcgtgtgcttgtcgtcgacaacgacccccagggcaacctgacgtctgtcgcggccgccgagcccgtgggggaggatcaggcggggctggccgatgtgctcagcgcgcgtgctccagagaccctccgcgatgtgatcgtgccgggaatctggtctggcctcgatgtcgtgccgacgtttggcatcacgctcggctgggtgcgtgacgaactcgtgatcgccggtgccggccgagaaggccggctgcgggaggccctggccggcgtcgaggacgactacgacgtgatcctgatcgactgtgctccatcgctcgatcagctcacgatcaacggcctggtggccgcccagggtgtcatcgtcgtgacgcactcgaagttgtggagcgccaacggcctcgcccagctgctcgacaccatcgacagcgtgcgcagctactacaacggcgcgctgcgcgtggcgggcatcatcgtcaaccagcacgaggagaacaccatcagcgggaaaacctggctcgacgagctgcatcaggctgccgagtcccggaagctgaccgtgcttgacccgccgatccccaagcgtgtcgtcatcgccgataccgtcgaggccgcgcgcggtctcgacgagtggggaagtgccgaggcggccgcgctcggccagttgtacgcccaccacctgacctgcatcgaaggagccctgtgatgacccgtccagccccccgaaagtcctcattgagcggatcaactccggtcgccccgccggctcagacggcgccggcaccgtctgccgcacctaccccccacaaggccgatgagtcacagacgagcagcaccacgaggaagtggcggcacaaggtgtcgttctaccaggacccggccgacaccgaccgggtgcgcggggcgatcctttacacgatgacgaccgagggcaaccggaacctgagccagttcgtcaacgatgccgtcatggccaaggtggtcgagctggaagtcaagtacaacgatggccagccattccccgctgtgggagcccgaggactaccccagggcggtgcagccgccgccggtgagtagaggaccatcgaccgtcgggggcttcaccatgcccccgaccctcggtcatcctgatcctcttgtcgatggtggtgacagtgggggattcacgcctcgttcagatcagaggaagtctcaccgcgtgattagtactatcaaatctgacagtactaacagagcagatagggttccctaggtcgagctgtatcacgccgacaaccagtgagccagtgatctacgaggggcgcaatatgcacccgatcggtagccgcgaaggcctcgccctgccccgatagtactatcaccactatcaatggtgctagtggtgagtttcttccattgatgacaacagcacagtgctgccgtctgtgtgcgggccaccagcccgcacacagttgccgtcgaggacgttgt

SEQ ID NO: 124 - DNA, 3842 bp, Propionibacterium acnes
  source 1..3842: mol_type = genomic DNA
cactccggccgcatccgattgctccacggccggctcgccggccatcgaattcctcacgccgcgacagccctcttcaccggtcacgggcaccagtcgatcgatgaccggcgagtagcggtagacgccgcgactcaagccggacacccgttgtgcggacatgaagatagacacgggatacagccctccaccagacgggacagcgcgtacattataccgcacgatatcaccgctcgaacgtgggacatccacgtgccccgtcacaccggcagcacctctcagaaacgcagctacgtcacgcaggtctagggattcgccggtgtagttccgtccgctgcgccggcgggcgatcacttgctcgaggggtgcgcgcaccctgctggacctgggaagttcgatcacatcggcagcgaacgtgtcgcgatccatctgtccgtacgtaacgatcatggggtcaacgaaatagtcgccgaccgagacgttgaactccatatccccccgggcgatgcgcgaggcgagcaagaagtctgcagctgcgttagacagccccggcccatcagtgttgtcgcagcggaactcgtgggtccgaaaccccacaccttccgtgcccgggctctgcgctcgatacgacgtgatcgcagaactagccttccttaaaccgcccggagtagctaccatgaccgtcccctctgaggtctcccgaacacttgcgacaatagcagcatgtgggggcagccgccagaggcgggcatccttgtctcgacaaccattgacctccggattcgatatgtgcataatcatagtcgtgccaacacgaaacgtgtacgtctcggaagacgacctagacctgttcgccgaagccaccgagatcgctggaggcctgtccgcagcggtgttggaggccttgcgcagctacgtagacaggcaccatcgcgcggccggcggattcgacgagatcgagctggagctgcagaacgacggtatcgaccaccgtgtcaccttcatgggtcgccgcctgatacacatccgccgtccagatcccgagggaacccgcatagacactgtctacttgaccgccaaacaccaattcgccgttgccaccaaaatccaacgacggctgccagactggacggccggccacgagcacatctggtccgacccggagacctggaatcgggagttctggatcgcaggtgacaagacgatggccgtgtatcccagccttgacaaactccgcgaagctgaccccaatgtggccgaacgcgccgaggccgcggtcaaaatcccgccgttcgaggtcctggacatctgatgacagaatcatcatcttcccggcggcaattggcaatgccggtgctgtcagtcacggatctagccaagaaatacgtggttcatggcggctacgaggtcccggcactcaacggtgtctcgtttgacctgcacccgggagagatgctgggtttgttcgggccaaacggtgctggaaagacgacgctggtcaggatcatcgcgggcctcttatcggcagattctggagacgtccactggggatcggatcaaggtcgggccaggttaggctacgtgtcccaaaagggtggactgcagtacgggctcacgtgccgggaagagatggtcttccacgcacaatgcttcggccagtccgccaagcaggcccggactagcgtcgacgaggtcgccgcgatgctgcactgcgattacctgatggagtgggacgtcggaaggctctccggtgggcaacgccgaatcatcgaggtagggctagcactcgtcaatcaaccatcggtcgtcctgctcgacgagcccaccctgggcctggaccccgcaacacgcctgtcgttgtggcaaacggtaaagtcggcacgccgtgagaccggtgctgccttcctcgtcaccacccactacattgacgaggtggccgagcacctgtccaacgtcagcgtgatcaaccacggaaccgtcgtcgccaacggctcgccagcgcacatccgagaaatgttcgcgaccggggaagtaacgctcggcgtggccgaggatacggtggacagtgcggtggacgtgttggctgggaccgcgttcgaggcgcaccccaccgaaaccgtcccggggatcgtggtcaggtccaggcatcccgacgtggacgcggccaagatcatcaccatcctggctggtcatggcatctcggtggactccatatccgtacgcgaggcgaccttggaagaggcgtttctcacgatcacaggcagtcgagacccggagaggcaaatcccatgaacacttgcttcaggcgatatgcggcgatgtcgctgagagcgcggcgtgatttggccctgacattcatccagcccctcgtctacctagccctcttcggaccgctcttcgtcacgacgatgaagatgtcgcagagagctaccgccgctacgggttactccctatacatcacgggcctgtccatccaaatggccatgacgatcggtgccttcgcggggctaaccatcatcctcgaataccgactcggcatcctcgaacggatctggagcacccccctcacggggagcaagatgatggcggggcgaatcgcgcgcgacgtcgttatgatgatgatgccgatactggtcgtcttcatcatcggcctggtgctgggaacacgccccagcccactgggcctggcgacctacttcgtgacagtgctcggcacaggagccacgttcgccggggtctcctacgcggtggcactcagaacgaagagcgaggcagcgctatccgcgatcttcaacctcatcctgctacccatcctcctgctgtcggggatcatgctgcccatgtcgttcgcaccacactggatcgccaccgctgcccacgtgaacccgttgtggtacctggtgcaaggcgcgcggaaccagttcagcgttctagggctcgtggcggcggccccatggagttgggctgtggccatcgtcatgtcagccgctgccttcggctgggcaagccacgaattcaacaagaggcgctgacacaaagaatggtgccgggaacccaggtccccggcaccaccgagtgcactcgcgacgtcaacgcaccgttgcggtcactgcgcaggtcgagcacgaggacgacgagcccgcgctgctgcaggtcgagccgccaggcgcgagcaggtcgacgttagcgtcggcgccgccgaagacggacgtgacggccggctgagaggtgcggatgcggtgctccagcgaggaggtggtggtgagtttcatgggaggtgctcctaggagtgagacgagaacaaaccctagcgataggttagcagtccgcaaccgactccgggaatagtagaagcgcgcatccgtagcggaagaccttagcctgattacagtgaccctgttcgcgtctcaacattattccacacccccgagcagcgaacgacaccgcgatgatgatccgtcgcctctccaccgaagaactccgcgcccacatcgcaccgggccgccgtcccgtgcatcagacctgccgtcaacgtcggccatgaagctgggaaggtggctctcgtctaggagcagacgcgggacgcctcctccaggttgggccggggaagtgtccggttcttgatgtaggtggcggtccctattgatgggcgttgaccgtgggaatgcggtcggcgaagggggtggcgaacccgttgagcgcaggcttccagcgcatgcatcaacgctgtctgccggccaccggcaagcctcacccgcccgtcatggccatcatcgaggtgccggtgaaccctcgacacatgaccccaccccccccggaggggcttccggggctgttcagccacc

SEQ ID NO: 125 - DNA, 3694 bp, Propionibacterium acnes
  source 1..3694: mol_type = genomic DNA
cacccgccgcatcgtgacctcatcctcacgtgccaccagcgggggagagcgactaccgctgcagccggtccaaagcgactcttcacagatgagggggtggatcggtagctgacccctaggtcctgatgtgggtcgaggtccttggaatgatggaagttcctacacacccatcgccaaagacctcaacatggacaacgctaccttcaccactccctcatctgtgaagagccagtttatgcacggtgttgaaagaggcgtcggtctacgacgaatgcgggttaatggtcttgcggtgtggggcgctgggcgatggcatcgagaacgcgtgagtgggtggcgatccattcggccgcgtcggggttgatgttgcgggcgacggtgtcgatcgctgttacgtagtgggcaagcctgcgaatctcagcttgttggtcagggtgagcgctgatgagaggctcttgatgggaggcgcggttacggacgtggcggatgagctccacgttttcctcgaagtcgcgtcggctacgccccgggtagtgaggcatacctccgttacgtaagtcagtgagagctttccatacggttgcttccaggcgcggggtgagcagaaagcgccagttgtccagtgacagactcgccacgatctgatcaggggtcgcatcgagcctcgcgcgccgcagtcgcttctcggccctggcgacgttacgcgggaaaccaccgagccgatagctcggggattcccaccaacgccgtatgccagtatcggcgctcaggcgcacgtcaatgaagtttctcaggagtacctcgacatggctgatgtcttccaagaacgctttcgagatgcgggtgttccacacgtaccacgcatcgactggttcgatccggtagcgtctgagcctggcgggtgagaaccactcctgcaacgtctcacgactcaccgtgggagcgtggtaggattgatgacgataggcctcgggaaggtcaatgccgcgaaatatcggtatacccccgaggtcattgttttgcccaggcccctcctcgcatacttgcggggcgtcattggctgccgtcatctcgtctcttcccggtacgtggctgtccatgttcacgggcaggtacggcaatgaggttcccgcacacaaacctctaccaagcatacgctggcaagcccccctctcggccccaccacaacatcaattgctgactcgaacacctttgaggcagcgctttcggcttgcgcaaccccacccacgacaccgtccgcttactactcgaagttgagggattcagaccccacctacaccctcgattgtgaagagcctccaaagcccgatacaacgtctggcgagacaccgtgaacgacctcgccaccgcagcaacgcaccagcagcgcgggatggcttggtattagcccagcgcagggcccccaggcaccagccctaacgaccccgcacccgacgtggctagaggataagccgcacgggaggactccatacccgccgactcattccagcccgccaccagccgagccatatgatcaaccgcccgcggtaaataatccagccactcacgccggtcgtacaaggaaccggccccgctccaggcgtgtgcccaggatcgccacaacacgtcgagctcgaccaccacgcccggaatagattcccactccaaatccggatcagcggccgccacgtaccagatcggccacatccgtcttggcccatctccagcccgccagacccagggaggccatcacctcatcgacgccgcgccgggtggtctcatcaaccccgtcaaacagctcgggccacctcgatgatgccgtccgtgaacgatccagattcatgacatgctcctcttcacagatgccgacgacgatcaggccgtggccgtggcaacggggtgacctgccggcgcggctcacgacgttgagccggaaccacacgagacgcaccagtgtgctgcgccgtcttgagtcgggcgctgtactgggccctggcgctgtggtgaacagcccgacgaagcaccgaccgccggctgtcctcatcgccagggcgaggcatggggcgcggcatggtgcgcccggtagcagcatccatgagggtgatccggtcagccaaaatgccgagccggttttcccacttccggggccacggcaccagcaggtcacgctgacagcccacgccgtggcgtcggcagtccacaacattttctcacggccaggatgcgagtgcagcagctccaccggaacaccagcatcacgcacccgccgcatcgtgacctcatcctcacgctgccgatcaccgtcaaccagatggtcagccacgatggtgttcacaccccatgactcatgcagttgcctggccaaggcgcccaacacctgctgacgcacctgtgacttgacgtcatcatcctccagatcctgtgtaccaaccatcacggaggccaacacatcactgcgttgcagaaccagggtgttgacgacgtcgacatcgtcgatacccatgggattgttggcgcgcgcggccacggcatgaaacgtgttggactgcaaattctcgaccagaccacgccgatagtcgttgaactgggaggtgtcggcaatgacaccggtcatgatgtaggccgacccctcggacaaggccctgtaggactcgtcgacgaacgccaccaaccccggccgccgccggtaaagtcgacctgcttcctcgtcagccagcaaccatgacagtttttgccccatatgtcctccttgctgacatgacctcgaacatggtaaactttccgtaggaaaaacggggcaagtactttcgagcggctacctcggcccccggtgggctgtccagccttgtgcggaccgaagccgggggattccttatgtttgcggcaatgatgccgctgcaccccctcatgccgtggtgtggtcctttccccgtgtgcggtgtggtgcgtcgttgactggtttgtggccccgagccttactctgaccggtaggagaacggtgtggggtctacggatagcccactcggctcccggtggaatgtccaacagggtagggttgatgagttggtccatcaggaccgtcccggtggctgcgtcaatgatcgatatttcgatgatgcgcccgtccaggtcggtggtttcggtgtcgaggatgactccgactccgggttctaggagttggggatccaatgggtggtcatcgtgtggctcctacagggagtgtctgggctggacagcggtgcaatacccgcgccatagcggttttttctgcgggggtgacccacagctggtatttcgttttgacggcgatttggcgggccacgtagtcgcatctgtaggccttgttagggggtagccaggtcgctgcatccctgtctcgtttggcctcattagcgggtccgtcgacagccagcaagttcaacgggtcgttggccagggcggtgcgttgcagcggtgagagtttttgcgcgccggtaatccacgcgttcccgagggctacgacgtggtcgatttggactgttgtcgaggtgtgccggccgcgccgccaggcgagtgtggacccggtgtaggggtcgtggagtcgcccggagacgaccacgcatcgtgatccgggtttcaggtgggcctcgaccaggtcgcgggcaagggcatcgttgcgggtgtcgcatccgttgtggccccaggggcgggtcaa

SEQ ID NO: 126 - DNA, 599 bp, Propionibacterium acnes; identical to SEQ ID NO: 100
  source 1..599: mol_type = genomic DNA

SEQ ID NO: 127 - DNA, 3076 bp, Propionibacterium acnes
  source 1..3076: mol_type = genomic DNA
gtgttccagtgcctcgcgggcgtgatgttcttcttcggcaccttcttgccacatgcttcgcgcttcagcctcgccatccaagcgaacctggactgtgaacgagtcctcatcgggtccgtcctcattccacgcggcaatgatcccacgggcctcgtctgcgacctgactcaacttcatcgcctgcccgacagccccgagagccggaatctcgaacacccagatattcgcctcagccgagacctcacgatgggcgatcacttcgtaggtcgtctcaccttctactgtcgtgtccattacttccactccttcggaattttcacgcctgctcgctccagctgtgccaggacaccaactgacgtcagctggtgtcctgctggtatcgatacgcgcccggctccgccggggcgtccccagatttcatggcttcccttggcgttccgcagacgggcccatccttgagaacggagcagcttgaggacgtccttagttttctgcggtttcacacatcatagtatagccccacttaacttgtaaactaagcccctgtttacattttagttggtgcatgtgatccctgctcttatgacgtcgcccgacctggcgccttagacatgcactgttcatcctcaaccacactcaccgtcacgggtccgaaggcgaggtctatcaccattcgcatcgatgaagttgaagcaggatcgtccgcatcacgcactgccgatccggacagacgccaccggccgtaccgactgtttacgatctgccaccgcagactgctgccataaccgctatcacctctgatagtacgtttagtactatcagaggtgattcaagattctcctgtcgagcagccctacagtcacgaagtcctgcgatcgtcatcgcttaaggcagacggatggccatcggggaccactcgcaaagcaggggcgatcagcaacagtgatgtgccatgagcaagtactggtgcaccggctgtttactccgcccctagataaaccacgggtgcaggggtggacaccacaccatgaccgatgtggtgcccaccccatggctcacaggcaggccctatcgccgggagcactgctgcagatgaggctcagtaacctgccatgtctcacctggggccaaggtgccaagctccccacggaatctcaggcatcggaaaccagcagccgaacttccacagcatgagcgccctacgaaaaagcaggccgccgacggttctcaagaactcgccggcggcctgcatcgccactcgaactgtaaccgtggtccgaccccgtgcacaggtaagctccacactcccaccaggcatggccgaggcagtaccaagttgccgtggcccatcggcagatttggttaaattttgaaaagtcatatagactccttctgtaaatttttaaatctcataggactctcgccatcgccagccagcttcgacaggagtcccgatgtttcaccgagtgaaatatcggcaccgtttgagttgacctaaagctcaaaagatgctagaatccatcttacctcgttaggggcgttttgtcaaacgcccctatattgcgtgtcttcgcgcgtcgtagcgctgatgctgcgcctgtgtcgactatccgtttgtaagtactttcgatgacaccagcagtggctactcatgactggtgcgtgcgggtctaaagcagcagggaaaggaatcgcagtagaagccgcttgattcctatcacccctgatggtactatcagtactaacagagcagggcttactcgatgcgtgagaatcggggacatgctgagcctctcgtaggtcattggcctgctgggcgtcagtgtggcgcggttcgatccagtgaactctatcagctctgttagtactgtcagagttgatatattcgaccccaggaggagcccatgagttacatcgttcgcaccggaaatttggtcgacacccccgagctgcgtgagggagagcatggcccgtacacctacgctcgcgtcatcgtgtccgatcgcattcgccaggaggacggcagctacgtcaacgggccagcgatcgcctacgacgtcttggcgggtggcagccaagccgtgaatctggttgaagccgccaaggcgagcggcaacatccgcatcatgttcgcgggccgttaccgcgtcaccgagtggcggggtgagcagggcactcgtatccagcatgaggtccgagccgacgaagtgagcgtgagcctgctcggtcagagggtgaccgtggagcggcctcgaggtgacgtggcatccaaggagagcacgtcgttctgattgagtccgggggcacggtggtcgccgtggtaaaccgtgcccctgacagtactattgacactattggaggtatcagtgtgactgctcaaattttcgccttgtgcaaccagaagggtggcgtcggaaagtcgacatcgacgtttcatctggcccgtgccgcggtgttgcgtggccagcgtgtgcttgtcgtcgacaacgacccccagggcaacctgacgtctgtcgcggccgccgagcccgtgggggaggatcaggcggggctggccgatgtgctcagcgcgcgtgctccagagaccctccgcgatgtgatcgtgccgggaatctggtctggcctcgatgtcgtgccgacgtctggcatcacgctcggctgggtgcgtgacgaactcgtgatcgccggtgccggccgagaaggccggctgcgggaggccctggccggcgtcgaggacgactacgacgtgatcctgatcgactgtgctccatcgctcgatcagctcacgatcaacggcctggtggccgcccagggtgtcatcgtcgtgacgcactcgaagttgtggagcgccaacggcctcgcccagctgctcgacaccatcgacagcgtgcgcagctactacaacggcgcgctgcgcgtggcgggcatcatcgtcaaccagcacgaggagaacaccatcagcgggaaaacctggctcgacgagctgcatcaggctgccgagtcccggaagctgaccgtgcttgacccgccgatccccaagcgtgtcgtcatcgccgataccgtcgaggccgcgcgc

SEQ ID NO: 128 - DNA, 2557 bp, Propionibacterium acnes
  source 1..2557: mol_type = genomic DNA
aaacctctaccaagcatacgctggcaagcccccctctcggccccaccacaacatcaattgctgactcgaacacctttgaggcagcgctttcggcttgcgcaaccccacccacgacaccgtccgcttactactcgaagctgagggattcagaccccacctacaccctcgattgtgaagagcctccaaagcccgatacaacgtctggcgagacaccgtgaacgacctcgccaccgcagcaacgcaccagcagcgcgggatggcttggtattagcccagcgcagggcccccaggcaccagccctaacgaccccgcacccgacgtggctagaggataagccgcacgggaggactccatacccgccgactcattccagcccgccaccagccgagccatatgatcaaccgcccgcggtaaataatccagccactcacgccggtcgtacaaggaaccggccccgctccaggcgtgtgcccaggatcgccacaacacgtcgagctcgaccaccacgcccggaatagattcccactccaaatccggatcagcggccgccacgtaccagatcggccacatccgtcttggcccatctccagcccgccagacccagggaggccatcacctcatcgacgccgcgccgggtggtctcatcaaccccgtcaaacagctcgggccacctcgatgatgccgtccgtgaacgatccagattcatgacatgctcctcttcacagatgccgacgacgatcaggccgtggccgtggcaacggggtgacctgccggcgcggctcacgacgttgagccggaaccacacgagacgcaccagtgtgctgcgccgtcttgagtcgggcgctgtactgggccctggcgctgtggtgaacagcccgacgaagcaccgaccgccggctgtcctcatcgccagggcgaggcatggggcgcggcatggtgcgcccggtagcagcatccatgagggtgatccggtcagccaaaatgccgagccggttttcccacttccggggccacggcaccagcaggtcacgctgacagcccacgccgtggcgtcggcagtccacaacattttctcacggccaggatgcgagtgcagcagctccaccggaacaccagcatcacgcacccgccgcatcgtgacctcatcctcacgctgccgatcaccgtcaaccagatggtcagccacgatggtgttcacaccccatgactcatgcagttgcctggccaaggcgcccaacacctgctgacgcacctgtgacttgacgtcatcatcctccagatcctgtgtaccaaccatcacggaggccaacacatcactgcgttgctgaaccagggtgttgacgacgtcgacatcgtcgatacccatgggattgttggcgcgcgcggccacggcatgaaacgtgttggactgcaaattctcgaccagaccacgccgatagtcgttgaactgggaggtgtcggcaatgacaccggtcatgatgtaggccgacccctcggacaaggccctgtaggactcgtcgacgaacgccaccaaccccggccgccgccggtaaagtcgacctgcttcctcgtcagccagcaaccatgacagtttttgccccatatgtcctccttgctgacatgacctcgaacatggtaaactttccgtaggaaaaacggggcaagtactttcgagcggctacctcggcccccggtgggctgtccagccttgtgcggaccgaagccgggggattccttatgtttgcggcaatgatgccgctgcaccccctcatgccgtggtgtggtcctttccccgtgtgcggtgtggtgcgtcgttgactggtttgtggccccgagccttactctgaccggtaggagaacggtgtggggtctacggatagcccactcggctcccggtggaatgtccaacagggtagggttgatgagttggtccatcaggaccgtcccggtggctgcgtcaatgatcgatatttcgatgatgcgcccgtccaggtcggtggtttcggtgtcgaggatgactccgactccgggttctaggagttggggatccaatgggtggtcatcgtgtggctcctacagggagtgtctgggctggacagcggtgcaatacccgcgccatagcggttttttctgcgggggtgacccacagctggtatttcgttttgacggcgatttggcgggccacgtagtcgcatctgtaggccttgttagggggtagccaggtcgctgcatccctgtctcgtttggcctcattagcgggtccgtcgacagccagcaagttcaacgggtcgttggccagggcggtgcgttgcagcggtgagagtttttgcgcgccggtaatccacgcgttcccgagggctacgacgtggtcgatttggactgttgtcgaggtgtgccggccgcgccgccaggcgagtgtggacccggtgtaggggtcgtggagtcgcccggagacgaccacgcatcgtgatccgggtttcaggtgggcctcgaccaggtcgcgggcaagggcatcgttgcgggtgtcgcatccgttgtggccccaggggcgggtcaa

SEQ ID NO: 129 - DNA, 599 bp, Propionibacterium acnes; identical to SEQ ID NO: 100
  source 1..599: mol_type = genomic DNA

SEQ ID NO: 130 - DNA, 1871 bp, Propionibacterium acnes
  source 1..1871: mol_type = genomic DNA
gccgacggttctcaagaactcgccggcggcctgcatcgccactcgaactgtaaccgtggtccgaccccgtgcacaggtaagctccacactcccaccaggcatggccgaggcagtaccaagttgccgtggcccatcggcagatttggttaaattttgaaaagtcatatagactccttctgtaaatttttaaatctcataggactctcgccatcgccagccagcttcgacaggagtcccgatgtttcaccgagtgaaatatcggcaccgtttgagttgacctaaagctcaaaagatgctagaatccatcttacctcgttaggggcgttttgtcaaacgcccctatattgcgtgtcttcgcgcgtcgtagcgctgatgctgcgcctgtgtcgactatccgtttgtaagtactttcgatgacaccagcagtggctactcatgactggtgcgtgcgggtctaaagcagcagggaaaggaatcgcagtagaagccgcttgattcctatcacccctgatggtactatcagtactaacagagcagggcttactcgatgcgtgagaatcggggacatgctgagcctctcgtaggtcattggcctgctgggcgtcagtgtggcgcggttcgatccagtgaactctatcagctctgttagtactgtcagagttgatatattcgaccccaggaggagcccatgagttacatcgttcgcaccggaaatttggtcgacacccccgagctgcgtgagggagagcatggcccgtacacctacgctcgcgtcatcgtgtccgatcgcattcgccaggaggacggcagctacgtcaacgggccagcgatcgcctacgacgtcttggcgggtggcagccaagccgtgaatctggttgaagccgccaaggcgagcggcaacatccgcatcatgttcgcgggccgttaccgcgtcaccgagtggcggggggagcagggcactcgtatccagcatgaggtccgagccgacgaagtgagcgtgagcctgctcggtcagagggtgaccgtggagcggcctcgaggtgacgtggcatccaaggagagcacgtcgttctgattgagtccgggggcacggtggtcgccgtggtaaaccgtgcccctgacagtactattgacactattggaggtatcagtgtgactgctcaaattttcgccttgtgcaaccagaagggtggcgtcggaaagtcgacatcgacgtttcatctggcccgtgccgcggtgttgcgtggccagcgtgtgcttgtcgtcgacaacgacccccagggcaacctgacgtctgtcgcggccgccgagcccgtgggggaggatcaggcggggctggccgatgtgctcagcgcgcgtgctccagagaccctccgcgatgtgatcgtgccgggaatctggtctggcctcgatgtcgtgccgacgtctggcatcacgctcggctgggtgcgtgacgaactcgtgatcgccggtgccggccgagaaggccggctgcgggaggccctggccggcgtcgaggacgactacgacgtgatcctgatcgactgtgctccatcgctcgatcagctcacgatcaacggcctggtggccgcccagggtgtcatcgtcgtgacgcactcgaagttgtggagcgccaacggcctcgcccagctgctcgacaccatcgacagcgtgcgcagctactacaacggcgcgctgcgcgtggcgggcatcatcgtcaaccagcacgaggagaacaccatcagcgggaaaacctggctcgacgagctgcatcaggctgccgagtcccggaagctgaccgtgcttgacccgccgatccccaagcgtgtcgtcatcgccgataccgtcgaggccgcgcgcggtctcgacga

SEQ ID NO: 131 - DNA, 1729 bp, Propionibacterium acnes
  source 1..1729: mol_type = genomic DNA
cacgcacccgccgcatcgtgacctcatcctcacgtgccaccagcgggggagagcgactaccgctgcagccggtccaaagcgactcttcacagatgagggggtggatcggtagctgacccctaggtcctgatgtgggtcgaggtccttggaatgatggaagttcctacacacccatcgccaaagacctcaacatggacaacgctaccttcaccactccctcatccgtgaagagccagtttatgcacggtgttgaaagaggcgtcggtctacgacgaatgcgggttaatggtcttgcggtgtggggcgctgggcgatggcatcgagaacgcgtgagtgggtggcgatccattcggccgcgtcggggttgatgttgcgggcgacggtgtcgatcgctgttacgtagtgggcaagcctgcgaatctcagcttgttggtcagggtgatcgctgatgagaggctcttgatgggaggcgcggttacggacgtggcggatgagctccacgttttcctcgaagtcgcgtcggctacgccccgggtagtgaggcatacctccgttacgtaagtcagtgagagctttccatacggttgcttccaggcgcggggtgagcagaaagcgccagttgtccagtgacagactcgccacgatctgatcaggggtcgcatcgagcctcgcgcgccgcagtcgcttctcggccctggcgacgttacgcgggaaaccaccgagccgatagctcggggattcccaccaacgccgtatgccagtatcggcgctcaggcgcacgtcaatgaagtttctcaggagtacctcgacatggctgatgtcttccaagaacgctttcgagatgcgggtgttccacacgtaccacgcatcgactggttcgatccggtagcggctgagcctggcgggtgagaaccactcctgcaacgtctcacgactcaccgtgggagcgtggtaggattgatgacgataggcctcgggaaggtcaatgccgcgaaatatcggtatacccccgaggccattgtcttgcccaggcccctcctcgcatacttgcggggcgtcattggctgccgtcatctcgtctcttcccggtacgtggctgtccatgttcacgggcaggtacggcaatgaggttcccgcacacaaacctctaccaagcatacgctggcaagcccccctctcggccccaccacaacatcaattgctgactcgaacacctttgaggcagcgctttcggcttgcgcaaccccacccacgacaccgtccgcttactactcgaagctgagggattcagaccccacctacaccctcgattgtgaagagcctccaaagcccgatacaacgtctggcgagacaccgtgaacgacctcgccaccgcagcaacgcaccagcagcgcgggatggcttggtattagcccagcgcagggcccccaggcaccagccctaacgaccccgcacccgacgtggctagaggataagccgcacgggaggactccatacccgccgactcattccagcccgccaccagccgagccatatgatcaaccgcccgcggtaaataatccagccactcacgccggtcgtacaaggaaccggccccgctccaggcgtgtgcccaggatcgccacaacacgtcgagctcgaccaccacgcccggaatagattcccactccaaatccggatcagcggccgccacgtaccagatcggccacatccgtcttggcccatctcc

SEQ ID NO: 132 - DNA, 1729 bp, Propionibacterium acnes; identical to SEQ ID NO: 131
  source 1..1729: mol_type = genomic DNA

SEQ ID NO: 133 - DNA, 1725 bp, Propionibacterium acnes
  source 1..1725: mol_type = genomic DNA
cgcacccgccgcatcgtgacctcatcctcacgtgccaccagcgggggagagcgactaccgctgcagccggtccaaagcgactcttcacagatgagggggtggatcggtagctgacccctaggtcctgatgtgggtcgaggtccttggaatgatggaagttcctacacacccatcgccaaagacctcaacatggacaacgctaccttcaccactccctcatccgtgaagagccagtttatgcacggtgttgaaagaggcgtcggtctacgacgaatgcgggttaatggtcttgcggtgtggggcgctgggcgatggcatcgagaacgcgtgagtgggtggcgatccattcggccgcgtcggggttgatgttgcgggcgacggtgtcgatcgctgttacgtagtgggcaagcctgcgaatctcagcttgttggtcagggtgatcgctgatgagaggctcttgatgggaggcgcggttacggacgtggcggatgagctccacgttttcctcgaagtcgcgtcggctacgccccgggtagtgaggcatacctccgttacgtaagtcagtgagagctttccatacggttgcttccaggcgcggggtgagcagaaagcgccagttgtccagtgacagactcgccacgatctgatcaggggtcgcatcgagcctcgcgcgccgcagtcgcttctcggccctggcgacgttacgcgggaaaccaccgagccgatagctcggggattcccaccaacgccgtatgccagtatcggcgctcaggcgcacgtcaatgaagtttctcaggagtacctcgacatggctgatgtcttccaagaacgctttcgagatgcgggtgttccacacgtaccacgcatcgactggttcgatccggtagcggctgagcctggcgggtgagaaccactcctgcaacgtctcacgactcaccgtgggagcgtggtaggattgatgacgataggcctcgggaaggtcaatgccgcgaaatatcggtatacccccgaggccattgtcttgcccaggcccctcctcgcatacttgcggggcgtcattggctgccgtcatctcgtctcttcccggtacgtggctgtccatgttcacgggcaggtacggcaatgaggttcccgcacacaaacctctaccaagcatacgctggcaagcccccctctcggccccaccacaacatcaattgctgactcgaacacctttgaggcagcgctttcggcttgcgcaaccccacccacgacaccgtccgcttactactcgaagctgagggattcagaccccacctacaccctcgattgtgaagagcctccaaagcccgatacaacgtctggcgagacaccgtgaacgacctcgccaccgcagcaacgcaccagcagcgcgggatggcttggtattagcccagcgcagggcccccaggcaccagccctaacgaccccgcacccgacgtggctagaggataagccgcacgggaggactccatacccgccgactcattccagcccgccaccagccgagccatatgatcaaccgcccgcggtaaataatccagccactcacgccggtcgtacaaggaaccggccccgctccaggcgtgtgcccaggatcgccacaacacgtcgagctcgaccaccacgcccggaatagattcccactccaaatccggatcagcggccgccacgtaccagatcggccacatccgtcttggcccatct

SEQ ID NO: 134 - DNA, 1719 bp, Propionibacterium acnes
  source 1..1719: mol_type = genomic DNA
cccgccgcatcgtgacctcatcctcacgtgccaccagcgggggagagcgactaccgctgcagccggtccaaagcgactcttcacagatgagggggtggatcggtagctgacccctaggtcctgatgtgggtcgaggtccttggaatgatggaagttcctacacacccatcgccaaagacctcaacatggacaacgctaccttcaccactccctcatccgtgaagagccagtttatgcacggtgttgaaagaggcgtcggtctacgacgaatgcgggttaatggtcttgcggtgtggggcgctgggcgatggcatcgagaacgcgtgagtgggtggcgatccattcggccgcgtcggggttgatgttgcgggcgacggtgtcgatcgctgttacgtagtgggcaagcctgcgaatctcagcttgttggtcagggtgatcgctgatgagaggctcttgatgggaggcgcggttacggacgtggcggatgagctccacgttttcctcgaagtcgcgtcggctacgccccgggtagtgaggcatacctccgttacgtaagtcagtgagagctttccatacggttgcttccaggcgcggggtgagcagaaagcgccagttgtccagtgacagactcgccacgatctgatcaggggtcgcatcgagcctcgcgcgccgcagtcgcttctcggccctggcgacgttacgcgggaaaccaccgagccgatagctcggggattcccaccaacgccgtatgccagtatcggcgctcaggcgcacgtcaatgaagtttctcaggagtacctcgacatggctgatgtcttccaagaacgctttcgagatgcgggtgttccacacgtaccacgcatcgactggttcgatccggtagcggctgagcctggcgggtgagaaccactcctgcaacgtctcacgactcaccgtgggagcgtggtaggattgatgacgataggcctcgggaaggtcaatgccgcgaaatatcggtatacccccgaggccattgttttgcccaggcccctcctcgcatacttgcggggcgtcattggctgccgtcatctcgtctcttcccggtacgtggctgtccatgttcacgggcaggtacggcaatgaggttcccgcacacaaacctctaccaagcatacgctggcaagcccccctctcggccccaccacaacatcaattgctgactcgaacacctttgaggcagcgctttcggcttgcgcaaccccacccacgacaccgtccgcttactactcgaagctgagggattcagaccccacctacaccctcgattgtgaagagcctccaaagcccgatacaacgtctggcgagacaccgtgaacgacctcgccaccgcagcaacgcaccagcagcgcgggatggcttggtattagcccagcgcagggcccccaggcaccagccctaacgaccccgcacccgacgtggctagaggataagccgcacgggaggactccatacccgccgactcattccagcccgccaccagccgagccatatgatcaaccgcccgcggtaaataatccagccactcacgccggtcgtacaaggaaccggccccgctccaggcgtgtgcccaggatcgccacaacacgtcgagctcgaccaccacgcccggaatagattcccactccaaatccggatcagcggccgccacgtaccagatcggccacatccgtcttggcccat

SEQ ID NO: 135 - DNA, 1656 bp, Propionibacterium acnes
  source 1..1656: mol_type = genomic DNA
accagcgggggagagcgactaccgctgcagccggtccaaagcgactcttcacagatgagggggtggatcggtagctgacccctaggtcctgatgtgggtcgaggtccttggaatgatggaagttcctacacacccatcgccaaagacctcaacatggacaacgctaccttcaccactccctcatctgtgaagagccagtttatgcacggtgttgaaagaggcgtcggtctacgacgaatgcgggttaatggtcttgcggtgtggggcgctgggcgatggcatcgagaacgcgtgagtgggtggcgatccattcggccgcgtcggggttgatgttgcgggcgacggtgtcgatcgctgttacgtagtgggcaagcctgcgaatctcagcttgttggtcagggtgagcgctgatgaggggctcttgatgggaggcgcggttacggacgtggcggatgagctccacgttttcctcgaagtcgcgtcggctacgccccgggtagtgaggcatacctccgttacgtaagtcagtgagagctttccatacggttgcttccaggcgcggggtgagcagaaagcgccagttgtccagtgacagactcgccacgatctgatcaggggtcgcatcgagcctcgcgcgccgcagtcgcttctcggccctgtcgacgttacgcgggaaaccaccgagccgatagctcggggattcccaccaacgccgtatgccagtatcggcgctcaggcgcacgtcaatgaagtttctcaggagtacctcgacatggctgatgtcttccaagaacgctttcgagatgcgggtgttccacacgtaccacgcatcgactggttcgatccggtagcggctgagcctggcgggtgagaaccactcctgcaacgtctcacgactcaccgtgggagcgtggtaggattgatgacgataggcctcgggaaggtcaatgccgcgaaatatcggtatacccccgaggccattgttttgcccaggcccctcctcgcatacttgcggggcgtcattggctgccgtcatctcgtctcttcccggtacgtggctgtccatgttcacgggcaggtacggcaatgaggttcccgcacacaaacctctaccaagcatacgctggcaagcccccctctcggccccaccacaacatcaattgctgactcgaacacctttgaggcagcgctttcggcttgcgcaaccccatccacgacaccgtccgcttactactcgaagctgagggattcagaccccacctacaccctcgattgtgaagagcctccaaagcccgatacaacgtctggcgagacaccgtgaacgacctcgccaccgcagcaacgcaccagcagcgcgggatggcttggtattagcccagcgcagggccccaggcaccagccctaacgaccccgcacccgacgtggctagaggataagccgcacgggaggactccatacccgccgactcattccagcccgccaccagccgagccatatgatcaaccgcccgcggtaaataatccagccactcacgccggtcgtataaggaaccggccccgctccaggcgtgtgcccaggatcgccacaacacgtcgagctcgaccaccacgcccggaatagattcccactccaaatccggatcagcggccgccacgt

SEQ ID NO: 136 - DNA, 1438 bp, Propionibacterium acnes
  source 1..1438: mol_type = genomic DNA
cacgcacccgccgcatcgtgacctcatcctcacgctgccgatcaccgtcaaccagatggtcagccacgatggtgttcacaccccatgactcatgcagttgcctggccaaggcgcccaacacctgctgacgcacctgtgacttgacgtcatcatcctccagatcctgtgtaccaaccatcacggaggccaacacatcactgcgttgctgaaccagggtgttgacgacgtcgacatcgtcgatacccatgggattgttggcgcgcgcggccacggcatgaaacgtgttggactgcaaattctcgaccagaccacgccgatagtcgttgaactgggaggtgtcggcaatgacaccggtcatgatgtaggccgacccctcggacaaggccctgtaggactcgtcgacgaacgccaccaaccccggccgccgccggtaaagtcgacctgcttcctcgtcagccagcaaccatgacagtttttgccccatatgtcctccttgctgacatgacctcgaacatggtaaactttccgtaggaaaaacggggcaagtactttcgagcggctacctcggcccccggtgggctgtccagccttgtgcggaccgaagccgggggattccttatgtttgcggcaatgatgccgctgcaccccctcatgccgtggtgtggtcctttccccgtgtgcggtgtggtgcgtcgttgactggtttgtggccccgagccttactctgaccggtaggagaacggtgtggggtctacggatagcccactcggctcccggtggaatgtccaacagggtagggttgatgagttggtccatcaggaccgtcccggtggctgcgtcaatgatcgatatttcgatgatgcgcccgtccaggtcggtggtttcggtgtcgaggatgactccgactccgggttctaggagttggggatccaatgggtggtcatcgtgtggctcctacagggagtgtctgggctggacagcggtgcaatacccgcgccatagcggttttttctgcgggggtgacccacagctggtatttcgttttgacggcgatttggcgggccacgtagtcgcatctgtaggccttgttagggggtagccaggtcgctgcatccctgtctcgtttggcctcattagcgggtccgtcgacagccagcaagttcaacgggtcgttggccagggcggtgcgttgcagcggtgagagtttttgcgcgccggtaatccacgcgttcccgagggctacgacgtggtcgatttggactgttgtcgaggtgtgccggccgcgccgccaggcgagtgtggacccggtgtaggggtcgtggagtcgcccggagacgaccacgcatcgtgatccgggtttcaggtgggcctcgaccaggtcgcgggcaagggcatcgttgcgggtgtcgcatccgttgtggccccaggggcgggtcaa

SEQ ID NO: 137 - DNA, 1436 bp, Propionibacterium acnes
  source 1..1436: mol_type = genomic DNA
cgcacccgccgcatcgtgacctcatcctcacgctgccgatcaccgtcaaccagatggtcagccacgatggtgttcacaccccatgactcatgcagttgcctggccaaggcgcccaacacctgctgacgcacctgtgacttgacgtcatcatcctccagatcctgtgtaccaaccatcacggaggccaacacatcactgcgttgctgaaccagggtgttgacgacgtcgacatcgtcgatacccatgggattgttggcgcgcgcggccacggcatgaaacgtgttggactgcaaattctcgaccagaccacgccgatagtcgttgaactgggaggtgtcggcaatgacaccggtcatgatgtaggccgacccctcggacaaggccctgtaggactcgtcgacgaacgccaccaaccccggccgccgccggtaaagtcgacctgcttcctcgtcagccagcaaccatgacagtttttgccccatatgtcctccttgctgacatgacctcgaacatggtaaactttccgtaggaaaaacggggcaagtactttcgagcggctacctcggcccccggtgggctgtccagccttgtgcggaccgaagccgggggattccttatgtttgcggcaatgatgccgctgcaccccctcatgccgtggtgtggtcctttccccgtgtgcggtgtggtgcgtcgttgactggtttgtggccccgagccttactctgaccggtaggagaacggtgtggggtctacggatagcccactcggctcccggtggaatgtccaacagggtagggttgatgagttggtccatcaggaccgtcccggtggctgcgtcaatgatcgatatttcgatgatgcgcccgtccaggtcggtggtttcggtgtcgaggatgactccgactccgggttctaggagttggggatccaatgggtggtcatcgtgtggctcctacagggagtgtctgggctggacagcggtgcaatacccgcgccatagcggttttttctgcgggggtgacccacagctggtatttcgttttgacggcgatttggcgggccacgtagtcgcatctgtaggccttgttagggggtagccaggtcgctgcatccctgtctcgtttggcctcattagcgggtccgtcgacagccagcaagttcaacgggtcgttggccagggcggtgcgttgcagcggtgagagtttttgcgcgccggtaatccacgcgttcccgagggctacgacgtggtcgatttggactgttgtcgaggtgtgccggccgcgccgccaggcgagtgtggacccggtgtaggggtcgtggagtcgcccggagacgaccacgcatcgtgatccgggtttcaggtgggcctcgaccaggtcgcgggcaagggcatcgttgcgggtgtcgcatccgttgtggccccaggggcgggtcaa

SEQ ID NO: 138 - DNA, 1436 bp, Propionibacterium acnes; identical to SEQ ID NO: 137
  source 1..1436: mol_type = genomic DNA

SEQ ID NO: 139 - DNA, 1432 bp, Propionibacterium acnes
  source 1..1432: mol_type = genomic DNA
cccgccgcatcgtgacctcatcctcacgctgccgatcaccgtcaaccagatggtcagccacgatggtgttcacaccccatgactcatgcagttgcctggccaaggcgcccaacacctgctgacgcacctgtgacttgacgtcatcatcctccagatcctgtgtaccaaccatcacggaggccaacacatcactgcgttgctgaaccagggtgttgacgacgtcgacatcgtcgatacccatgggattgttggcgcgcgcggccacggcatgaaacgtgttggactgcaaattctcgaccagaccacgccgatagtcgttgaactgggaggtgtcggcaatgacaccggtcatgatgtaggccgacccctcggacaaggccctgtaggactcgtcgacgaacgccaccaaccccggccgccgccggtaaagtcgacctgcttcctcgtcagccagcaaccatgacagtttttgccccatatgtcctccttgctgacatgacctcgaacatggtaaactttccgtaggaaaaacggggcaagtactttcgagcggctacctcggcccccggtgggctgtccagccttgtgcggaccgaagccgggggattccttatgtttgcggcaatgatgccgctgcaccccctcatgccgtggtgtggtcctttccccgtgtgcggtgtggtgcgtcgttgactggtttgtggccccgagccttactctgaccggtaggagaacggtgtggggtctacggatagcccactcggctcccggtggaatgtccaacagggtagggttgatgagttggtccatcaggaccgtcccggtggctgcgtcaatgatcgatatttcgatgatgcgcccgtccaggtcggtggtttcggtgtcgaggatgactccgactccgggttctaggagttggggatccaatgggtggtcatcgtgtggctcctacagggagtgtctgggctggacagcggtgcaatacccgcgccatagcggttttttctgcgggggtgacccacagctggtatttcgttttgacggcgatttggcgggccacgtagtcgcatctgtaggccttgttagggggtagccaggtcgctgcatccctgtctcgtttggcctcattagcgggtccgtcgacagccagcaagttcaacgggtcgttggccagggcggtgcgttgcagcggtgagagtttttgcgcgccggtaatccacgcgttcccgagggctacgacgtggtcgatttggactgttgtcgaggtgtgccggccgcgccgccaggcgagtgtggacccggtgtaggggtcgtggagtcgcccggagacgaccacgcatcgtgatccgggtttcaggtgggcctcgaccaggtcgcgggcaagggcatcgttgcgggtgtcgcatccgttgtggccccaggggcgggtcaa

SEQ ID NO: 140 - DNA, 1432 bp, Propionibacterium acnes
  source 1..1432: mol_type = genomic DNA
cccgccgcatcgtgacctcatcctcacgctgccgatcaccgtcaaccagatggtcagccacgatggtgttcacaccccatgactcatgcagttgcctggccaaggcgcccaacacctgctgacgcacctgtgacttgacgtcatcatcctccagatcctgtgtaccaaccatcacggaggccaacacatcactgcgttgctgaaccagggtgttgacgacgtcgacatcgtcgatatccatgggattgttggcgcgcgcggccacggcatgaaacgtgttggactgcaaattctcgaccagaccacgccgatagtcgttgaactgggaggtgtcggcaatgacaccggtcatgatgtaggccgacccctcggacaaggccctgtaggactcgtcgacgaacgccaccaaccccggccgccgccggtaaagtcgacctgcttcctcgtcagccagcaaccatgacagtttttgccccatatgtcctccttgctgacatgacctcgaacatggtaaactttccgtaggaaaaacggggcaagtactttcgagcggctacctcggcccccggtgggctgtccagccttgtgcggaccgaagccgggggattccttatgtttgcggcaatgatgccgctgcaccccctcatgccgtggtgtggtcctttccccgtgtgcggtgtggtgcgtcgttgactggtttgtggccccgagccttactctgaccggtaggagaacggtgtggggtctacggatagcccactcggctcccggtggaatgtccaacagggtagggttgatgagttggtccatcaggaccgtcccggtggctgcgtcaatgatcgatatttcgatgatgcgcccgtccaggtcggtggtttcggtgtcgaggatgactccgactccgggttctaggagttggggatccaatgggtggtcatcgtgtggctcctacagggagtgtctgggctggacagcggtgcaatacccgcgccatagcggttttttctgcgggggtgacccacagctggtatttcgttttgacggcgatttggcgggccacgtagtcgcatctgtaggccttgttagggggtagccaggtcgctgcatccctgtctcgtttggcctcattagcgggtccgtcgacagccagcaagttcaacgggtcgttggccagggcggtgcgttgcagcggtgagagtttttgcgcgccggtaatccacgcgttcccgagggctacgacgtggtcgatttggactgttgtcgaggtgtgccggccgcgccgccaggcgagtgtggacccggtgtaggggtcgtggagtcgcccggagacgaccacgcatcgtgatccgggtttcgggtgggcctcgaccaggtcgcgggcaagggcatcgttgcgggtgtcgcatccgttgtggccccaggggcgggtcaa

SEQ ID NO: 141 - DNA, 1438 bp, Propionibacterium acnes
  source 1..1438: mol_type = genomic DNA
cacgcacccgccgcatcgtgacctcatcctcacgctgccgatcaccgtcaaccagatggtcagccacgatggtgttcacaccccatgactcatgcagttgcctggccaaggcgcccaacacctgctgacgcacctgtgacttgacgtcatcatcctccagatcctgtgtaccaaccatcacggaggccaacacatcactgcgttgctgaaccagggtgttgacgacgtcgacatcgtcgatacccatgggattgttggcgcgcgcggccacggcatgaaacgtgttggactgcaaattctcgaccagaccacgccgatagtcgttgaactgggaggtgtcggcaatgacaccggtcatgatgtaggccgacccctcggacaaggccctgtaggactcgtcgacgaacgccaccaaccccggccgccgccggtaaagtcgacctgcttcctcgtcagccagcaaccatgacagtttttgccccatatgtcctccttgctgacatgacctcgaacatggtaaactttccgtaggaaaaacggggcaagtactttcgagcggctacctcggcccccggtgggctgtccagccttgtgcggaccgaagccgggggattccttatgtttgcggcaatgatgccgcttcattttttcttgccgtggtgtggtcctttccccgtgtgcggtgtggtgcgtcgttgactggtttgtggccccgagccttactctgaccggtaggagaacggtgtggggtctacggatagcccactcggctcccggtggaatgtccaacagggtagggttgatgagttggtccatcaggaccgtcccggtggctgcgtcaatgatcgatatttcgatgatgcgcccgtccaggtcggtggtttcggtgtcgaggatgactccgactccgggttctaggagttggggatccaatgggtggtcatcgtgtggctcctacagggagtgtctgggctggacagcggtgcaatacccgcgccatagcggttttttctgcgggggtgacccacagctggtatttcgttttgacggcgatttggcgggccacgtagtcgcatctgtaggccttgttagggggtagccaggtcgctgcatccctgtctcgtttggcctcattagcgggtccgtcgacagccagcaagttcaacgggtcgttggccagggcggtgcgttgcagcggtgagagtttttgcgcgccggtaatccacgcgttcccgagggctacgacgtggtcgatttggactgttgtcgaggtgtgccggccgcgccgccaggcgagtgtggacccggtgtaggggtcgtggagtcgcccggagacgaccacgcatcgtgatccgggtttcaggtgggcctcgaccaggtcgcgggcaagggcatcgttgcgggtgtcgcatccgttgtggccccaggggcgggtcaa

SEQ ID NO: 142 - DNA, 1399 bp, Propionibacterium acnes
  source 1..1399: mol_type = genomic DNA
gatcaccgtcaaccagatggtcagccacgatggtgttcacaccccatgactcatgcagttgcctggccaaggcgcccaacacctgctgacgcacctgtgacttgacgtcatcatcctccagatcctgtgtaccaaccatcacggaggccaacacatcactgcgttgctgaaccagggtgttgacgacgtcgacatcgtcgatacccatgggattgttggcgcgcgcggccacggcatgaaacgtgttggactgcaaattctcgaccagaccacgccgatagtcgttgaactgggaggtgtcggcaatgacaccggtcatgatgtaggccgacccctcggacaaggccctgtaggactcgtcgacgaacgccaccaaccccggccgccgccggtaaagtcgacctgcttcctcgtcagccagcaaccatgacagtttttgccccatatgtcctccttgctgacatgacctcgaacatggtaaactttccgtaggaaaaacggggcaagtactttcgagcggctacctcggcccccggtggaatgtccagccttgtgcggaccgaagccgggggattccttatgtttgcggcaatgatgccgctgcaccccctcatgccgtggtgtggtcctttccccgtgtgcggtgtggtgcgtcgttgactggtttgtggccccgagccttactctgaccggtaggagaacggtgtggggtctacggatagcccactcggctcccggtggaatgtccaacagggtagggttgatgagttggtccatcaggaccgtcccggtggctgcgtcaatgatcgatatttcgatgatgcgcccgtccaggtcggtggtttcggtgtcgaggatgactccgactccgggttctaggagttggggatccaatgggtggtcatcgtgtggctcctacagggagtgtctgggctggacagcggtgcaatacccgcgccatagcggttttttctgcgggggtgacccacagctggtatttcgttttgacggcgatttggcgggccacgtagtcgcatctgtaggccttgttagggggtagccaggtcgctgcatccctgtctcgtttggcctcattagcgggtccgtcgacagccagcaagttcaacgggtcgttggccagggcggtgcgttgcagcggtgagagtttttgcgcgccggtaatccacgcgttcccgagggctacgacgtggtcgatttggactgttgtcgaggtgtgccggccgcgccgccaggcgagtgtggacccggtgtaggggtcgtggagtcgcccggagacgaccacgcatcgtgatccgggtttcaggtgggcctcgaccaggtcgcgggcaagggcatcgttgcgggtgtcgcatccgttgtggccccaggggcgggtcaa

SEQ ID NO: 143 - DNA, 1155 bp, Propionibacterium acnes
  source 1..1155: mol_type = genomic DNA
acaaacctctaccaagcatacgctggcaagcccccctctcggccccaccacaacatcaattgctgactcgaacacctttgaggcagcgctttcggcttgcgcaaccccacccacgacaccgtccgcttactactcgaagctgagggattcagaccccacctacaccctcgattgtgaagagcctccaaagcccgatacaacgtctggcgagacaccgtgaacgacctcgccaccgcagcaacgcaccagcagcgcgggatggcttggtattagcccagcgcagggcccccaggcaccagccctaacgaccccgcacccgacgtggctagaggataagccgcacgggaggactccatacccgccgactcattccagcccgccaccagccgagccatatgatcaaccgcccgcggtaaataatccagccactcacgccggtcgtacaaggaaccggccccgctccaggcgtgtgcccaggatcgccacaacacgtcgagctcgaccaccacgcccggaatagattcccactccaaatccggatcagcggccgccacgtaccagatcggccacatccgtcttggcccatctccagcccgccagacccagggaggccatcacctcatcgacgccgcgccgggtggtctcatcaaccccgtcaaacagctcgggccacctcgatgatgccgtccgtgaacgatccagattcatgacatgctcctcttcacagatgccgacgacgatcaggccgtggccgtggcaacggggtgacctgccggcgcggctcacgacgttgagccggaaccacacgagacgcaccagtgtgctgcgccgtcttgagtcgggcgctgtactgggccctggcgctgtggtgaacagcccgacgaagcaccgaccgccggctgtcctcatcgccagggcgaggcatggggcgcggcatggtgcgcccggtagcagcatccatgagggtgatccggtcagccaaaatgccgagccggttttcccacttccggggccacggcaccagcaggtcacgctgacagcccacgccgtggcgtcggcagtccacaacattttctcacggccaggatgcgagtgcagcagctccaccggaacaccagcatcacgcacccgccgcatcgtgacctcatcctcacg

SEQ ID NO: 144 - DNA, 715 bp, Propionibacterium acnes
  source 1..715: mol_type = genomic DNA
accagatcggccacatccgtcttggcccatctccagcccgccagacccagggaggccatcacctcatcgacgccgcgccgggtggtctcatcaaccccgtcaaacagctcgggccacctcgatgatgccgtccgtgaacgatccagattcatgacatgctcctcttcacagatgccgacgacgatcaggccgtggccgtggcaacggggtgacctgccggcgcggctcacgacgttgagccggaaccacacgagacgcaccagtgtgctgcgccgtcttgagtcgggcgctgtactgggccctggcgctgtggtgaacagcccgacgaagcaccgaccgccggctgtcctcatcgccagggcgaggcatggggcgcggcatggtgcgcccggtagcagcatccatgagggtgatccggtcagccaaaatgccgagccggttttcccacttccggggccacggcaccagcaggtcacgctgacagcccacgccgtggcgtcggcagtccacaacattttctcacggccaggatgcgagtgcagcagctccaccggaacaccagcatcacgcacccgccgcatcgtgacctcatcctcacgtgccaccagcgggggagagcgactaccgctgcagccggtccaaagcgactcttcacagatgagggggtggatcggtagctgacccctaggtcctgatgtgggtcgaggtccttgga

SEQ ID NO: 145 - DNA, 1134 bp, Propionibacterium acnes
  source 1..1134: mol_type = genomic DNA
gtgttccagtgcctcgcgggcgtgatgttcttcttcggcaccttcttgccacatgcttcgcgcttcagcctcgccatccaagcgaacctggactgtgaacgagtcctcatcgggtccgtcctcattccacgcggcaatgatcccacgggcctcgtctgcgacctgactcaacttcatcgcctgcccgacagccccgagagccggaatctcgaacacccagatattcgcctcagccgagacctcacgatgggcgatcacttcgtaggtcgtctcaccttctactgtcgtgtccattacttccactccttcggaattttcacgcctgctcgctccagctgtgccaggacaccaactgacgtcagctggtgtcctgctggtatcgatacgcgcccggctccgccggggcgtccccagatttcatggcttcccttggcgttccgcagacgggcccatccttgagaacggagcagcttgaggacgtccttagttttctgcggtttcacacatcatagtatagccccacttaacttgtaaactaagcccctgtttacattttagttggtgcatgtgatccctgctcttatgacgtcgcccgacctggcgccttagacatgcactgttcatcctcaaccacactcaccgtcacgggtccgaaggcgaggtctatcaccattcgcatcgatgaagttgaagcaggatcgtccgcatcacgcactgccgatccggacagacgccaccggccgtaccgactgtttacgatctgccaccgcagactgctgccataaccgctatcacctctgatagtacgtttagtactatcagaggtgattcaagattctcctgtcgagcagccctacagtcacgaagtcctgcgatcgtcatcgcttaaggcagacggatggccatcggggaccactcgcaaagcaggggcgatcagcaacagtgatgtgccatgagcaagtactggtgcaccggctgtttactccgcccctagataaaccacgggtgcaggggtggacaccacaccatgaccgatgtggtgcccaccccatggctcacaggcaggccctatcgccgggagcactgctgcagatgaggctcagtaacctgccatgtctcacctggggccaaggt

SEQ ID NO: 146 - DNA, 1057 bp, Propionibacterium acnes
  source 1..1057: mol_type = genomic DNA
cccctaggtcctgatgtgggtcgaggtccttggaatgatggaagttcctacacacccatcgccaaagacctcaacatggacaacgctaccttcaccactccctcatctgtgaagagccagtttatgcacggtgttgaaagaggcgtcggtctacgacgaatgcgggttaatggtcttgcggtgtggggcgctgggcgatggcatcgagaacgcgtgagtgggtggcgatccattcggccgcgtcggggttgatgttgcgggcgacggtgtcgatcgctgttacgtagtgggcaagcctgcgaatctcagcttgttggtcagggtgatcgctgatgagaggctcttgatgggaggcgcggttacggacgtggcggatgagctccacgttttcctcgaagtcgcgtcggctacgccccgggtagtgaggcatacctccgttacgtaagtcagtgagagctttccatacggttgcttccaggcgcggggtgagcagaaagcgccagttgtccagtgacagactcgccacgatctgatcaggggtcgcatcgagcctcgcgcgccgcagtcgcttctcggccctggcgacgttacgcgggaaaccaccgagccgatagctcggggattcccaccaacgccgtatgccagtatcggcgctcaggcgcacgtcaatgaagtttctcaggagtacctcgacatggctgatgtcttccaagaacgctttcgagatgcgggtgttccacacgtaccacgcatcgactggttcgatccggtagcggctgagcctggcgggtgagaaccactcctgcaacgtctcacgactcaccgtgggagcgtggtaggattgatgacgataggcctcgggaaggtcaatgccgcgaaatatcggtatacccccgaggtcattgttttgcccaggcccctcctcgcatacttgcggggcgtcattggctgccgtcatctcgtctcttcccggtacgtggctgtccatgttcacgggcaggtacggcaatgaggttcccgcacacaaacctctaccaagcatacgctggcaagcccc

SEQ ID NO: 147 - DNA, 1057 bp, Propionibacterium acnes; identical to SEQ ID NO: 146
  source 1..1057: mol_type = genomic DNA

SEQ ID NO: 148 - DNA, 1057 bp, Propionibacterium acnes; identical to SEQ ID NO: 146
  source 1..1057: mol_type = genomic DNA

SEQ ID NO: 149 - DNA, 1055 bp, Propionibacterium acnes
  source 1..1055: mol_type = genomic DNA
cccctaggtcctgatgtgggtcgaggtccttggaatgatggaagttcctacacacccatcgccaaagacctcaacatggacaacgctaccttcaccactccctcatctgtgaagagccagtttatgcacggtgttgaaagaggcgtcggtctacgacgaatgcgggttaatggtcttgcggtgtggggcgctgggcgatggcatcgagaacgcgtgagtgggtggcgatccattcggccgcgtcggggttgatgttgcgggcgacggtgtcgatcgctgttacgtagtgggcaagcctgcgaatctcagcttgttggtcagggtgatcgctgatgaggggctcttgatgggaggcgcggttacggacgtggcggatgagctccacgttttcctcgaagtcgcgtcggctacgccccgggtagtgaggcatacctccgttacgtaagtcagtgagagctttccatacggttgcttccaggcgcggggtgagcagaaagcgccagttgtccagtgacagactcgccacgatctgatcaggggtcgcatcgagccccgcgcgccgcagtcgcttctcggccctggcgacgttacgcgggaaaccaccgagccgatagctcggggattcccaccaacgccgtatgccagtatcggcgctcaggcgcacgtcaatgaagtttctcaggagtacctcgacatggctgatgtcttccaagaacgctttcgagatgcgggtgttccacacgtaccacgcatcgactggttcgatccggtagcggctgagcctggcgggtgagaaccactcctgcaacgtctcacgactcaccgtgggagcgtggtaggattgatgacgataggcctcgggaaggtcaatgccgcgaaatatcggtatacccccgaggtcattgtcttgcccaggcccctcctcgcatacttgcggggcgtcattggctgccgtcatctcgtctcttcccggtacgtggctgtccatgttcacgggcaggtacggcaatgaggttcccgcacacaaacctctaccaagcatacgctggcaagcc

SEQ ID NO: 150 - DNA, 1055 bp, Propionibacterium acnes; identical to SEQ ID NO: 149
  source 1..1055: mol_type = genomic DNA

SEQ ID NO: 151 - DNA, 1055 bp, Propionibacterium acnes
  source 1..1055: mol_type = genomic DNA
cccctaggtcctgatgtgggtcgaggtccttggaatgatggaagttcctacacacccatcgccaaagacctcaacatggacaacgctaccttcaccactccctcatctgtgaagagccagtttatgcacggtgttgaaagaggcgtcggtctacgacgaatgcgggttaatggtcttgcggtgtggggcgctgggcgatggcatcgagaacgcgtgagtgggtggcgatccattcggccgcgtcggggttgatgttgcgggcgacggtgtcgatcgctgttacgtagtgggcaagcctgcgaatctcagcttgttggtcagggtgagcgctgatgaggggctcttgatgggaggcgcggttacggacgtggcggatgagctccacgttttcctcgaagtcgcgtcggctacgccccgggtagtgaggcatacctccgttacgtaagtcagtgagagctttccatacggttgcttccaggcgcggggtgagcagaaagcgccagttgtccagtgacagactcgccacgatctgatcaggggtcgcatcgagcctcgcgcgccgcagtcgcttctcggccctgtcgacgttacgcgggaaaccaccgagccgatagctcggggattcccaccaacgccgtatgccagtatcggcgctcaggcgcacgtcaatgaagtttctcaggagtacctcgacatggctgatgtcttccaagaacgctttcgagatgcgggtgttccacacgtaccacgcatcgactggttcgatccggtagcggctgagcctggcgggtgagaaccactcctgcaacgtctcacgactcaccgtgggagcgtggtaggattgatgacgataggcctcgggaaggtcaatgccgcgaaatatcggtatacccccgaggccattgttttgcccaggcccctcctcgcatacttgcggggcgtcattggctgccgtcatctcgtctcttcccggtacgtggctgtccatgttcacgggcaggtacggcaatgaggttcccgcacacaaacctctaccaagcatacgctggcaagcc

SEQ ID NO: 152 - DNA, 1055 bp, Propionibacterium acnes
  source 1..1055: mol_type = genomic DNA
cccctaggtcctgatgtgggtcgaggtccttggaatgatggaagttcctacacacccatcgccaaagacctcaacatggacaacgctaccttcaccactccctcatccgtgaagagccagtttatgcacggtgttgaaagaggcgtcggtctacgacgaatgcgggttaatggtcttgcggtgtggggcgctgggcgatggcatcgagaacgcgtgagtgggtggcgatccattcggccgcgtcggggttgatgttgcgggcgacggtgtcgatcgctgttacgtagtgggcaagcctgcgaatctcagcttgttggtcagggtgagcgctgatgaggggctcttgatgggaggcgcggttacggacgtggcggatgagctccacgttttcctcgaagtcgcgtcggctacgccccgggtagtgaggcatacctccgttacgtaagtcagtgagagctttccatacggttgcttccaggcgcggggtgagcagaaagcgccagttgtccagtgacagactcgccacgatctgatcaggggtcgcatcgagcctcgcgcgccgcagtcgcttctcggccctgtcgacgttacgcgggaaaccaccgagccgatagctcggggattcccaccaacgccgtatgccagtatcggcgctcaggcgcacgtcaatgaagtttctcaggagtacctcgacatggctgatgtcttccaagaacgctttcgagatgcgggtgttccacacgtaccacgcatcgactggttcgatccggtagcggctgagcctggcgggtgagaaccactcctgcaacgtctcacgactcaccgtgggagcgtggtaagattgatgacgataggcctcgggaaggtcaatgccgcgaaatatcggtatacccccgaggtcattgtcttgcccaggcccctcctcgcatacttgcggggcgtcattggctgccgtcatctcgtctcttcccggtacgtggctgtccatgttcacgggcaggtacggcaatgaggttcccgcacacaaacctctaccaagcatacgctggcaagcc

SEQ ID NO: 153 - DNA, 1057 bp, Propionibacterium acnes
  source 1..1057: mol_type = genomic DNA
cccctaggtcctgatgtgggtcgaggtccttggaatgatggaagttcctacacacccatcgccaaagacctcaacatggacaacgctaccttcaccactccctcatctgtgaagagccagtttatgcacggtgttgaaagaggcgtcggtctacgacgaatgcgggttaatggtcttgtggtgtggggcgctgggcgatggcatcgagaacgcgtgagtgggtggcgatccattcggccgcgtcggggttgatgttgcgggcgacggtgtcgatcgctgttacgtagtgggcaagcctgcgaatctcagcttgttggtcagggtgatcgctgatgaggggctcttgatgggaggcgcggttacggacgtggcggatgagctccacgttttcctcgaagtcgcgtcggctacgccccgggtagtgaggcatacctccgttacgtaagtcagtgagagctttccatacggttgcttccaggcgcggggtgagcagaaagcgccagttgtccagtgacagactcgccacgatctgatcaggggtcgcatcgagcctcgcgcgccgcagtcgcttctcggccctggcgacgttacgcgggaaaccaccgagccgatagctcggggattcccagcaacgccgtatgccagtatcggcgctcaggcgcacgtcaatgaagtttctcaggagtacctcgacatggctgatgtcttccaagaacgctttcgagatgcgggtgttccacacgtaccacgcatcgactggttcgatccggtagcggctgagcctggcgggtgagaaccactcctgcaacgtctcacgactcaccgtgggagcgtggtaggattgatgacgataggcctcgggaaggtcaatgccgcgaaatatcggtatacccccgaggtcattgttttgcccaggcccctcctcgcatacttgcggggcgtcattggctgccgtcatctcgtctcttcccggtacgtggctgtccatgttcacgggcaggtacggcaatgaggttcccgcacacaaacctctaccaagcatacgctggcaagcccc

SEQ ID NO: 154 - DNA, 1055 bp, Propionibacterium acnes
  source 1..1055: mol_type = genomic DNA
cccctaggtcctgatgtgggtcgaggtccttggaatgatggaagttcctacacacccatcgccaaagacctcaacatggacaacgctaccttcaccactccctcatctgtgaagagccagtttatgcacggtgttgaaagaggcgtcggtctacgacgaatgcgggttaatggtcttgtggtgtggggcgctgggcgatggcatcgagaacgcgtgagtgggtggcgatccattcggccgcgtcggggttgatgttgcgggcgacggtgtcgatcgctgttacgtagtgggcaagcctgcgaatctcagcttgttggtcagggtgagcgctgatgagaggctcttgatgggaggcgcggttacggacgtggcggatgagctccacgttttcctcgaagtcgcgtcggctacgccccgggtagtgaggcatacctccgttacgtaagtcagtgagagctttccatacggttgcttccaggcgcggggtgagcagaaagcgccagttgtccagtgacagactcgccacgatctgatcaggggtcgcatcgagcctcgcgcgccgcagtcgcttctcggccctgtcgacgttacgcgggaaaccaccgagccgatagctcggggattcccaccaacgccgtatgccagtatcggcgctcaggcgcacgtcaatgaagtttctcaggagtacctcgacatggctgatgtcttccaagaacgctttcgagatgcgggtgttccacacgtaccacgcatcgactggttcgatccggtagcggctgagcctggcgggtgagaaccactcctgcaacgtctcacgactcaccgtgggagcgtggtaagattgatgacgataggcctcgggaaggtcaatgccgcgaaatatcggtatacccccgaggtcattgtcttgcccaggcccctcctcgcatacttgcggggcgtcattggctgccgtcatctcgtctcttcccggtacgtggctgtccatgttcacgggcaggtacggcaatgaggttcccgcacacaaacctctaccaagcatacgctggcaagcc

SEQ ID NO: 155 - DNA, 1057 bp, Propionibacterium acnes
  source 1..1057: mol_type = genomic DNA
cccctaggtcctgatgtgggtcgaggtccttggaatgatggaagttcctacacacccatcgccaaagacctcaacatggacaacgctaccttcaccactccctcatctgtgaagagccagtttatgcacggtgttgaaagaggcgtcggtctacgacgaatgcgggttaatggtcttgcggtgtggggcgctgggcgatggcatcgagaacgcgtgagtgggtggcgatccattcggccgcgtcggggttgatgttgcgggcgacggtgtcgatcgctgttacgtagtgggcaagcctgcgaatctcagcttgttggtcagggtgagcgctgatgaggggctcttgatgggaggcgcggttacggacgtggcggatgagctccacgttttcctcgaagtcgcgtcggctacgccccgggtagtgaggcatacctccgttacgtaagtcagtgagagctttccatacggttgcttccaggcgcggggtgagcagaaagcgccagttgtccagtgacagactcgccacgatctgatcaggggtcgcatcgagcctcgcgcgccgcagtcgcttctcggccctgtcgacgttacgcgggaaaccaccgagccgatagctcggggattcccaccaacgccgtatgccagtatcggcgctcaggcgcacgtcaatgaagtttctcaggagtacctcgacatggctgatgtcttccaagaacgctttcgagatgcgggtgttccacacgtaccacgcatcgactggttcgatccggtagcggctgagcctggcgggtgagaaccactcctgcaacgtctcacgactcaccgtgggagcgtggtaggattgatgacgataggcctcgggaaggtcaatgccgcgaaatatcggtatacccccgaggtcattgttttgcccaggcccctcctcgcatacttgcggggcgtcattggctggcgtcatctcgtctcttcccggtacgtggctgtccatgttcacgggcaggtacggcaatgaggttcccgcacacaaacctctaccaagcatacgctggcaagcccc

SEQ ID NO: 156 - DNA, 1055 bp, Propionibacterium acnes
  source 1..1055: mol_type = genomic DNA
cccctaggtcctgatgtgggtcgaggtccttggaatgatggaagttcctacacacccatcgccaaagacctcaacatggacaacgctaccttcaccactccctcatctgtgaagagccagtttatgcacggtgttgaaagaggcgtcggtctacgacgaatgcgggttaatggtcttgcggtgtggggcgctgggcgatggcatcgagaacgcgtgagtgggtggcgatccattcggccgcgtcggggttgatgttgcgggcgacggtgtcgatcgctgttacgtagtgggcaagcctgcgaatctcagcttgttggtcagggtgagcgctgatgaggggctcttgatgggaggcgcggttacggacgtggcggatgagctccacgttttcctcgaagtcgcgtcggctacgccccgggtagtgaggcatacctccgttacgtaagtcagtgagagctttccatacggttgcttccaggcgcggggtgagcagaaagcgccagttgtccagtgacagactcgccacgatctgatcaggggtcgcatcgagcctcgcgcgccgcagtcgcttctcggccctgtcgacgttacgcgggaaaccaccgagccgatagctcggggattcccaccaacgccgtatgccagtatcggcgctcaggcgcacgtcaatgaagtttctcaggagtacctcgacatggctgatgtcttccaagaacgctttcgagatgcgggtgttccacacgtaccacgcatcgactggttcgatccggtagcggctgagcctggcgggtgagaaccactcctgcaacgtctcacgactcaccgtgggagcgtggtaagattgatgacgataggcctcgggaaggtcaatgccgcgaaatatcggtatacccccgaggtcattgtcttgcccaggcccctcctcgcatacttgcggggcgtcattggctgccgtcatctcgtctcttcccggtacgtggctgtccatgttcacgggcaggtacggcaatgaggttcccgcacacaaacctctaccaaacatacgctggcaagcc

SEQ ID NO: 157 - DNA, 1055 bp, Propionibacterium acnes
  source 1..1055: mol_type = genomic DNA
cccctaggtcctgatgtgggtcgaggtccttggaatgatggaagttcctacacacccatcgccaaagacctcaacatggacaacgctaccttcaccactccctcatctgtgaagagccagtttatgcacggtgttgaaagaggcgtcggtctacgacgaatgcgggttaatggtcttgcggtgtggggcgctgggcgatggcatcgagaacgcgtgagtgggtggcgatccattcggccgcgtcggggttgatgttgcgggcgacggtgtcgatcgctgttacgtagtgggcaagcctgcgaatctcagcttgttggtcagggtgagcgctgatgaggggctcttgatgggaggcgcggttacggacgtggcggatgagctccacgttttcctcgaagtcgcgtcggctacgccccgggtagtgaggcatacctccgttacgtaagtcagtgagagctttccatacggttgcttccaggcgcggggtgagcagaaagcgccagttgtccagtgacagactcgccacgatctgatcaggggtcgcatcgagccccgcgcgccgcagtcgcgcctcggccctggcgacgttacgcgggaaaccaccgagccgatagctcggggattcccaccaacgccgtatgccagtatcggcgctcaggcgcacgtcaatgaagtttctcaggagtacctcgacatggctgatgtcttccaagaacgctttcgagatgcaggtgttccacacgtaccacgcatcgactggttcgatccggtagcggctgagcctggcgggtgagaaccactcctgcaacgtctcacgactcaccgtgggagcgtggtaagattgatgacgataggcctcgggaaggtcaatgccgcgaaatatcggtatacccccgaggtcattgtcttgcccaggcccctcctcgcatacttgcggggcgtcattggctgccgtcatctcgtctcttcccggtacgtggctgtccatgttcacgggcaggtacggcaatgaggttcccgcacacaaacctctaccaagcatacgctggcaagcc

SEQ ID NO: 158 - DNA, 1055 bp, Propionibacterium acnes; identical to SEQ ID NO: 157
  source 1..1055: mol_type = genomic DNA

SEQ ID NO: 159 - DNA, 1055 bp, Propionibacterium acnes
  source 1..1055: mol_type = genomic DNA
cccctaggtcctgatgtgggtcgaggtccttggaatgatggaagttcctacacacccatcgccaaagacctcaacatggacaacgctaccttcaccactccctcatctgtgaagagccagtttatgcacggtgttgaaagaggcgtcggtctacgacgaatgcgggttaatggtcttgcggtgtggggcgctgggcgatggcatcgagaacgcgtgagtgggtggcgatccattcggccgcgtcggggttgatgttgcgggcgacggtgtcgatcgctgttacgtagtgggcaagcctgcgaatctcagcttgttggtcagggtgatcgctgatgagaggctcttgatgggaggcgcggttacggacgtggcggatgcgctccacgtttttctcgaagtcgcgtcggctacgccccgggtagtgaggcatacctccgttacgtaagtcagtgagagctttccatacggttgcttcccggcgcgaggtgagcagaaagcgccagctgtccagtgacagactcgccacgatctgatcaggggtcgcatcgcgccccgcgctccgcagtcgcgcctcggccctgtcgacgttacgcgggaaaccaccgacccgatatctcggggattcccaccaacaccgtctgccagtatcggcgctcaggcgcacgtcaatgaagtttctcaggagtacctcgacatggctgatgtcttccaagaacgctttcgagatgcgggtgttccacacgtaccacgcatcgactggttcgatccggtagcggctgagcctggcgggtgagaaccactcctgcaacgtctcacgactcaccgtgggagcgtggtaggattgatgacgataggcctcgggaaggtcaatgccgcgaaatatcggtatacccccgaggtcattgtcttgcccaggcccctcctcgcatacttgcggggcgtcattggctgccgtcatctcgtctcttcccggtacgtggctgtccatgttcacgggcaggtacggcaatgaggttcccgcacacaaacctctaccaagcatacgctggcaagcc

SEQ ID NO: 160 - DNA, 825 bp, Propionibacterium acnes
  source 1..825: mol_type = genomic DNA
cgcacccgccgcatcgtgacctcatcctcacgctgccgatcaccgtcaaccagatggtcagccacgatggtgttcacaccccatgactcatgcagttgcctggccaaggcgcccaacacctgctgacgcacctgtgacttgacgtcatcatcctccagatcctgtgtaccaaccatcacggaggccaacacatcactgcgttgctgaaccagggtgttgacgacgtcgacatcgtcgatacccatgggattgttggcgcgcgcggccacggcatgaaacgtgttggactgcaaattctcgaccagaccacgccgatagtcgttgaactgggaggtgtcggcaatgacaccggtcatgatgtaggccgacccctcggacaaggccctgtaggactcgtcgacgaacgccaccaaccccggccgccgccggtaaagtcgacctgcttcctcgtcagccagcaaccatgacagtttttgccccatatgtcctccttgctgacatgacctcgaacatggtaaactttccgtaggaaaaacggggcaagtactttcgagcggctacctcggcccccggtgggctgtccagccttgtgcggaccgaagccgggggattccttatgtttgcggcaatgatgccgctgcaccccctcatgccgtggtgtggtcctttccccgtgtgcggtgtggtgcgtcgttgactggtttgtggccccgagccttactctgaccggtaggagaacggtgtggggtctacggatagcccactcggctcccggtggaatgtccaacagggtagggttgatgagttggtccatcaggaccgtcc

SEQ ID NO: 161 - DNA, 825 bp, Propionibacterium acnes; identical to SEQ ID NO: 160
  source 1..825: mol_type = genomic DNA

SEQ ID NO: 162 - DNA, 821 bp, Propionibacterium acnes
  source 1..821: mol_type = genomic DNA
cacccgccgcatcgtgacctcatcctcacgctgccgatcaccgtcaaccagatggtcagccacgatggtgttcacaccccatgactcatgcagttgcctggccaaggcgcccaacacctgctgacgcacctgtgacttgacgtcatcatcctccagatcctgtgtaccaaccatcacggaggccaacacatcactgcgttgctgaaccagggtgttgacgacgtcgacatcgtcgatacccatgggattgttggcgcgcgcggccacggcatgaaacgtgttggactgcaaattctcgaccagaccacgccgatagtcgttgaactgggaggtgtcggcaatgacaccggtcatgatgtaggccgacccctcggacaaggccctgtaggactcgtcgacgaacgccaccaaccccggccgccgccggtaaagtcgacctgcttcctcgtcagccagcaaccatgacagtttttgccccatatgtcctccttgctgacatgacctcgaacatggtaaactttccgtaggaaaaacggggcaagtactttcgagcggctacctcggcccccggtgggctgtccagccttgtgcggaccgaagccgggggattccttatgtttgcggcaatgatgccgctgcaccccctcatgccgtggtgtggtcctttccccgtgtgcggtgtggtgcgtcgttgactggtttgtggccccgagccttactctgaccggtaggagaacggtgtggggtctacggatagcccactcggctcccggtggaatgtccaacagggtagggttgatgagttggtccatcaggaccgt

SEQ ID NO: 163 - DNA, 769 bp, Propionibacterium acnes
  source 1..769: mol_type = genomic DNA
ccttcaccactccctcatctgtgaagagccagtttatgcacggtgttgaaagaggcgtcggtctacgacgaatgcgggttaatggtcttgcggtgtggggcgctgggcgatggcatcgagaacgcgtgagtgggtggcgatccattcggccgcgtcggggttgatgttgcgggcgacggtgtcgatcgctgttacgtagtgggcaagcctgcgaatctcagcttgttggtcagggtgagcgctgatgagaggctcttgatgggaggcgcggttacggacgtggcggatgagctccacgttttcctcgaagtcgcgtcggctacgccccgggtagtgaggcatacctccgttacgtaagtcagtgagagctttccatacggttgcttccaggcgcggggtgagcagaaagcgccagttgtccagtgacagactcgccacgatctgatcaggggtcgcatcgagcctcgcgcgccgcagtcgcttctcggccctggcgacgttacgcgggaaaccaccgagccgatagctcggggattcccaccaacgccgtatgccagtatcggcgctcaggcgcacgtcaatgaagtttctcaggagtacctcgacatggctgatgtcttccaagaacgctttcgagatgcgggtgttccacacgtaccacgcatcgactggttcgatccggtagcggctgagcctggcgggtgagaaccactcctgcaacgtctcacgactcaccgtgggagcgtggtaggattgatgacgataggcc

SEQ ID NO: 164 - DNA, 603 bp, Propionibacterium acnes
  source 1..603: mol_type = genomic DNA
accagatcggccacatccgtcttggcccatctccagcccgccagacccagggaggccatcacctcatcgacgccgcgccgggtggtctcatcaaccccgtcaaacagctcgggccacctcgatgatgccgtccgtgaacgatccagattcatgacatgctcctcttcacagatgccgacgacgatcaggccgtggccgtggcaacggggtgacctgccggcgcggctcacgacgttgagccggaaccacacgagacgcaccagtgtgctgcgccgtcttgagtcgggcgctgtactgggccctggcgctgtggtgaacagcccgacgaagcaccgaccgccggctgtcctcatcgccagggcgaggcatggggcgcggcatggtgcgcccggtagcagcatccatgagggtgatccggtcagccaaaatgccgagccggttttcccacttccggggccacggcaccagcaggtcacgctgacagcccacgccgtggcgtcggcagtccacaacattttctcacggccaggatgcgagtgcagcagctccaccggaacaccagcatcacgcacccgccgcatcgtgacctcatcctcacgtgcc

SEQ ID NO: 165 - DNA, 599 bp, Propionibacterium acnes; identical to SEQ ID NO: 100
  source 1..599: mol_type = genomic DNA

SEQ ID NO: 166 - DNA, 599 bp, Propionibacterium acnes; identical to SEQ ID NO: 100
  source 1..599: mol_type = genomic DNA

SEQ ID NO: 167 - DNA, 599 bp, Propionibacterium acnes; identical to SEQ ID NO: 100
  source 1..599: mol_type = genomic DNA

SEQ ID NO: 168 - DNA, 599 bp, Propionibacterium acnes; identical to SEQ ID NO: 100
  source 1..599: mol_type = genomic DNA

SEQ ID NO: 169 - DNA, 599 bp, Propionibacterium acnes; identical to SEQ ID NO: 100
  source 1..599: mol_type = genomic DNA

SEQ ID NO: 170 - DNA, 599 bp, Propionibacterium acnes; identical to SEQ ID NO: 100
  source 1..599: mol_type = genomic DNA

SEQ ID NO: 171 - DNA, 599 bp, Propionibacterium acnes; identical to SEQ ID NO: 100
  source 1..599: mol_type = genomic DNA

SEQ ID NO: 172 - DNA, 599 bp, Propionibacterium acnes; identical to SEQ ID NO: 100
  source 1..599: mol_type = genomic DNA

SEQ ID NO: 173 - DNA, 599 bp, Propionibacterium acnes; identical to SEQ ID NO: 100
  source 1..599: mol_type = genomic DNA

SEQ ID NO: 174 - DNA, 599 bp, Propionibacterium acnes; identical to SEQ ID NO: 100
  source 1..599: mol_type = genomic DNA

SEQ ID NO: 175 - DNA, 599 bp, Propionibacterium acnes; identical to SEQ ID NO: 100
  source 1..599: mol_type = genomic DNA

SEQ ID NO: 176 - DNA, 645 bp, Propionibacterium acnes
  source 1..645: mol_type = genomic DNA
ggttgatgagttggtccatcaggaccgtcccggtggctgcgtcaatgatcgatatttcgatgatgcgcccgtccaggtcggtggtttcggtgtcgaggatgactccgactccgggttctaggagttgttcggggatccaatgggtggtcatcgtgtggctcctacagggagtgtctgggtcgggcagcggtgcaatacccgcgccatagcggtcttctctgcggcggtgacccacagctggtacttcattttgacggcgatttggcgggccacatagtcgcatctgtaggccttgttagggggtagccaggtcgctgcatccctgtctcgtttggcctcattagcgggtccgtcgacagccagcaagttcaacgggtcgttggccagggcggtgcgttgcagcggtgagagtttttgcgcgccggtaatccacgcgttcccgagggctacgacgtggtcgatttggactgttgtcgaggtgtgccggccgcgccgccaggcgagtgtggacccggtgtaggggtcgtggagtcgcccggagacgaccacgcatcgtgatccgggtttcaggtgggcctcgaccaggtcgcgggcaagggcatcgttgcgggtgtcgcatccgttgtggccccaggggcgggtcaa

SEQ ID NO: 177 - DNA, 588 bp, Propionibacterium acnes
  source 1..588: mol_type = genomic DNA
acaaacctctaccaagcatacgctggcaagcccccctctcggccccaccacaacatcaattgctgactcgaacacctttgaggcagcgctttcggcttgcgcaaccccacccacgacaccgtccgcttactactcgaagctgagggattcagaccccacctacaccctcgattgtgaagagcctccaaagcccgatacaacgtctggcgagacaccgtgaacgacctcgccaccgcagcaacgcaccagcagcgcgggatggcttggtattagcccagcgcagggcccccaggcaccagccctaacgaccccgcacccgacgtggctagaggataagccgcacgggaggactccatacccgccgactcattccagcccgccaccagccgagccatatgatcaaccgcccgcggtaaataatccagccactcacgccggtcgtacaaggaaccggccccgctccaggcgtgtgcccaggatcgccacaacacgtcgagctcgaccaccacgcccggaatagattcccactccaaatccggatcagcggccgccacgtaccagatcggccacatccgtcttggcccatct

SEQ ID NO: 178 - DNA, 588 bp, Propionibacterium acnes; identical to SEQ ID NO: 177
  source 1..588: mol_type = genomic DNA

SEQ ID NO: 179 - DNA, 586 bp, Propionibacterium acnes
  source 1..586: mol_type = genomic DNA
aaacctctaccaagcatacgctggcaagcccccctctcggccccaccacaacatcaattgctgactcgaacacctttgaggcagcgctttcggcttgcgcaaccccacccacgacaccgtccgcttactactcgaagctgagggattcagaccccacctacaccctcgattgtgaagagcctccaaagcccgatacaacgtctggcgagacaccgtgaacgacctcgccaccgcagcaacgcaccagcagcgcgggatggcttggtattagcccagcgcagggcccccaggcaccagccctaacgaccccgcacccgacgtggctagaggataagccgcacgggaggactccatacccgccgactcattccagcccgccaccagccgagccatatgatcaaccgcccgcggtaaataatccagccactcacgccggtcgtacaaggaaccggccccgctccaggcgtgtgcccaggatcgccacaacacgtcgagctcgaccaccacgcccggaatagattcccactccaaatccggatcagcggccgccacgtaccagatcggccacatccgtcttggcccatct

SEQ ID NO: 180 - DNA, 586 bp, Propionibacterium acnes; identical to SEQ ID NO: 179
  source 1..586: mol_type = genomic DNA

SEQ ID NO: 181 - DNA, 584 bp, Propionibacterium acnes
  source 1..584: mol_type = genomic DNA
aaacctctaccaagcatacgctggcaagcccccctctcggccccaccacaacatcaattgctgactcgaacacctttgaggcagcgctttcggcttgcgcaaccccacccacgacaccgtccgcttactactcgaagctgagggattcagaccccacctacaccctcgattgtgaagagcctccaaagcccgatacaacgtctggcgagacaccgtgaacgacctcgccaccgcagcaacgcaccagcagcgcgggatggcttggtattagcccagcgcagggcccccaggcaccagccctaacgaccccgcacccgacgtggctagaggataagccgcacgggaggactccatacccgccgactcattccagcccgccaccagccgagccatatgatcaaccgcccgcggtaaataatccagccactcacgccggtcgtacaaggaaccggccccgctccaggcgtgtgcccaggatcgccacaacacgtcgagctcgaccaccacgcccggaatagattcccactccaaatccggatcagcggccgccacgtaccagatcggccacatccgtcttggcccat

SEQ ID NO: 182 - DNA, 582 bp, Propionibacterium acnes
  source 1..582: mol_type = genomic DNA
acctctaccaagcatacgctggcaagcccccctctcggccccaccacaacatcaattgctgactcgaacacctttgaggcagcgctttcggcttgcgcaaccccacccacgacaccgtccgcttactactcgaagctgagggattcagaccccacctacaccctcgattgtgaagagcctccaaagcccgatacaacgtctggcgagacaccgtgaacgacctcgccaccgcagcaacgcaccagcagcgcgggatggcttggtattagcccagcgcagggcccccaggcaccagccctaacgaccccgcacccgacgtggctagaggataagccgcacgggaggactccatacccgccgactcattccagcccgccaccagccgagccatatgatcaaccgcccgcggtaaataatccagccactcacgccggtcgtacaaggaaccggccccgctccaggcgtgtgcccaggatcgccacaacacgtcgagctcgaccaccacgcccggaatagattcccactccaaatccggatcagcggccgccacgtaccagatcggccacatccgtcttggcccat

SEQ ID NO: 183 - DNA, 592 bp, Propionibacterium acnes
  source 1..592: mol_type = genomic DNA
cccctaggtcctgatgtgggtcgaggtccttggaatgatggaagttcctacacacccatcgccaaagacctcaacatggacaacgctaccttcaccactccctcatctgtgaagagccagtttatgcacggtgttgaaagaggcgtcggtctacgacgaatgcgggttaatggtcttgcggtgtggggcgctgggcgatggcatcgagaacgcgtgagtgggtggcgatccattcggccgcgtcggggttgatgttgcgggcgacggtgtcgatcgctgttacgtagtgggcaagcctgcgaatctcagcttgttggtcagggtgagcgctgatgaggggctcttgatgggaggcgcggttacggacgtggcggatgagctccacgttttcctcgaagtcgcgtcggctacgccccgggtagtgaggcatacctccgttacgtaagtcagtgagagctttccatacggttgcttccaggcgcggggtgagcagaaagcgccagttgtccagtgacagactcgccacgatctgatcaggggtcgcatcgagcctcgcgcgccgcagtcgcttctcggccctgtcgacgttacg

SEQ ID NO: 184 - DNA, 570 bp, Propionibacterium acnes
  source 1..570: mol_type = genomic DNA
accagatcggccacatccgtcttggcccatctccagcccgccagacccagggaggccatcacctcatcgacgccgcgccgggtggtctcatcaaccccgtcaaacagctcgggccacctcgatgatgccgtccgtgaacgatccagattcatgacatgctcctcttcacagatgccgacgacgatcaggccgtggccgtggcaacggggtgacctgccggcgcggctcacgacgttgagccggaaccacacgagacgcaccagtgtgctgcgccgtcttgagtcgggcgctgtactgggccctggcgctgtggtgaacagcccgacgaagcaccgaccgccggctgtcctcatcgccagggcgaggcatggggcgcggcatggtgcgcccggtagcagcatccatgagggtgatccggtcagccaaaatgccgagccggttttcccacttccggggccacggcaccagcaggtcacgctgacagcccacgccgtggcgtcggcagtccacaacattttctcacggccaggatgcgagtgcagcagctccaccggaacaccagcatcacgc

SEQ ID NO: 185 - DNA, 570 bp, Propionibacterium acnes; identical to SEQ ID NO: 184
  source 1..570: mol_type = genomic DNA

SEQ ID NO: 186 - DNA, 581 bp, Propionibacterium acnes
  source 1..581: mol_type = genomic DNA
cccctaggtcctgatgtgggtcgaggtccttggaatgatggaagttcctacacacccatcgccaaagacctcaacatggacaacgctaccttcaccactccctcatccgtgaagagccagtttatgcacggtgttgaaagaggcgtcggtctacgacgaatgcgggttaatggtcttgcggtgtggggcgctgggcgatggcatcgagaacgcgtgagtgggtggcgatccattcggccgcgtcggggttgatgttgcgggcgacggtgtcgatcgctgttacgtagtgggcaagcctgcgaatctcagcttgttggtcagggtgagcgctgatgagaggctcttgatgggaggcgcggttacggacgtggcggatgagctccacgttttcctcgaagtcgcgtcggctacgccccgggtagtgaggcatacctccgttacgtaagtcagtgagagctttccatacggttgcttccaggcgcggggtgagcagaaagcgccagttgtccagtgacagactcgccacgatctgatcaggggtcgcatcgagccccgcgcgccgcagtcgcgcctcggccctg

SEQ ID NO: 187 - DNA, 48365 bp, Propionibacterium acnes
  source 1..48365: mol_type = genomic DNA
agcatctacggcgaaggccccgactgctccgtactcaccaaccgcatctacaccgaccagcccaccgatgtgaccgctgcactcgccgactacggcttcaccatcgacaccaccaacacatccaaaaccatcctcacgctcacccgcacagccaccatctcccacctgctagccatcctcgatggcctaccccaagctgaggggactcactggctcaacactcaacccgacctccaccacatcaccctcgacgactccaccaccggctgggccaccaaccgcaccgacgacaccgacaccggcgtctgctacgacaccagcacccacaactggcagatctgctgacagcatgacgggcctgcccttgagggcaggcccgctaccacctgactctccctccgaaaagagggaaccacctctcggccagagcggccgagcttgagagatgagagcaataacgttcatggtcgtctccccgagtggtggggtgcgttacttagcgccgccacacggtgacggtgtcagtgccgacaaacggagacccctcgggcccacgaatgaacggggccacccactgcaggcgtcggagactgcgcttgggaccgtagggctggtgtgtccaatgcccccgcaccacatgacgggtcgtcaaccgcctaccggtcgcatcggtggtggtgtgcacctgcctcataggccgcatatcgaccacatcgtccagcgtgtcgtctccgacgaacaaccttcgccccggcggcgaatcggtcgctgtacagctagagcccgcaagatcgtcacaggagtcccttccctcgggttgcgcctcccgttttttgtactaccatattggtatggccatcgagttcactgatagtgccggcaagcacgggttcactcgcgaggacgcaatccacgcgatgcagacccctgaggtcttcacgccccacttcgaccactcccgtaccgacggcccggatgtcgcggcatgggttggtcccgcgaggggagggaggaccatcgaggtgttcgccacgttggttcccccggacacggttaccgtcttccactgcatggacgtgcgagccacgaccatcgccaagctgaatggagagcgagcatgagcaccacccctgccgggttcgacttcgacgctctggccgagtgggccgagagcgatgaggcgacccacaccccgcaaaccagccccgtgttccggggcaaggacgccgcgcgcgccagccgcgcattcctcggccgaggacggcccaccctcggcgcggaccacgccaccggcgagggccggtcgccccgccgtcaggtacggctcgacgcacgcaccaacgcgcgactcgacgcctacgcagccgcaaccggcaccagcgcctcccagatcatccgcgacgccctcgctgactacctgcccgcctgatcccaccccaatccactcgggcgcctgtcagtgccccctcttctgggtggtggtccggggcgtcaccgccccggaccagttgggtagtcatctcagttgaaataagcgattagtgatacgcccctcctgctttccggtgctgtcatgagcgtctgacaacagcgacacctcggggcagccgacggacagtcctctggctgccgctctgatcccatgcccacggcacgaaggtgtcggacagctcggtctcgtcatgtgcccaaatagcgtcgtgggcctgtcgccaagcttctcgggagccccacacgggcacgaccgggccacaccggtgtcctggtctccagtgtcgcgacactgtcgatttcggtacgtgcaatgcggcggcggtttgacggatcgacatcccagactcccgcgcgtcccagatcgccatgtggagagtatttgcctccagtgcggccgccacacttgcacgctctcgcgcacgctcgaatgcccgcctagtgctctcaaatgtcgtcacgacgcctccccctgaaaatactcagggtgtcccacggtgggacaccctgagtatttcataccccaactcgcctcaccacacgtcgacctcgacaccgatcaagcgacccgtatcagcgacattgccgtaccgctgccccgcctggtcctccagccacgacaacgcatcccgaaacagcccgacgtcttccaaagctaaaccacagtcgtagccgcccttgtcccccaaccgcacaatctggcgctcccggtggcctccctcgtcgacctcgatccacagtttcgcgtgcatccgctggcctcggccctctgacaggatctcggtgagcaggtcggaggcttgtcctcgcgcatcctcgttactgcgggggaattggagtatgtgggaggaacgacgatgggggaggttggtgacctcgtgacgcagcaggttgcgcttgtgcatctgctgatcgagacgctcgggctgacctgttgacggggttgagccgtggcgccgcttcctcggcggggtctcgatccgttgctcttccggcggttcggcgtcaggttgtggtgcgcgatctcccctaggacgggggggctcgccacctatatccgagggacgatgagacggccttccacgcttgctgcgtaccttcgcggtccggcctttgcgatcatgccgacgccgcggcggggtaacctcctcgccccgctccaactgtgttaacgcctcgaccaggttggtgccaggcttaagccctttcagcacgaaccgcaccaggcgggggtctcggccgattcgtcgggcaatctcggcttggctccacccttcggctaacagggtgcgcaccaagtcctgagcccgattgtcacgctcagtcactggtcgcctcctcggggagtcctacttgctcggcctgctctgatagagcagcccgctccgatccggtctgaggcgcttccaaagggcccggcaagacacctttgacacgcagccgcccgtccttgccgtcatcgccgcccccctgggccacagggagcgcccaggggggcacgttgctggtgtagatggcgtcgccgtggatagccagcagggtgcgggagttcatgcgtagtgctcctcccttggttgtggcgttttttccggtggtggggtcggcgatgggtgtgttgagggtgcgtacgcgggacagggcccagatgcgggcggcgatttcggggtgccaggtgtcggggtcggggcggcggcgggcggtttggtattggtaggcgatggtgtcaccggttttgttgcggatgacgtcgaagccttcgatgtcggaggggatgtcgtcggcgtcgtagacgacggtggtggtgacggggttggaggccgacatttggccgatggtcacgcgcagcatgtttttcaacgcggaggtgaggattgtcgtggcggtggggtttttgtctgcccagcgtttctcggcgatgtcgatcatgtcttggatggttttgacccatcctcggatgggatcgactttggtcagtttgatcccttcgaggaactcgatgggctgggtgatgggcccatctggtccggcttcggtgtcccagccttcgtcgatggctagtttcagttcggcggtatcgacccatgtttcgtgggtggtgccgggcacgttgggccaaaaccatcctgctcgtcctttggtgcgtttgaccggtagtaggccgatgtcgtcccaccaggatggcacggtgaagcggatgtggtagcgggccgggtgccaggggttgttggtgaacaggtcgcgggcttcggtggcgctgagcagagtggcgggtgcggcaccgatctctccggtcactgatccggcatacatgaatcggccgtcgatgtacacgaagttagggatagggccggcaggcacggtggggcgccagcccttttcgcggtcctcggggttgccgtcgtcgacgcatagttcgtagcggtgctgaggggaggtgtgttggatgagtgcgcccagttcggggtccatcggctccatgcgataggactcgggggtccgtagcttccagaggttgattccttctgctccggggcggtccatgagggcccagtcgcggtcgattctggtggcgatgatgtgggttaattcgcgccatgcccagcgggcctggattggggtgagggtctggccagggaaccattcatcagcgaccagaatgtcgaggttgcggtcggtttctttgtgggtgaaccggcctcgggcgggccgcccggacagcatgaacaggccccgcacgtgccagtcctggttgaactcgcgggtgtgagcgggggtgtcaggcagcagccaggattgaggctggtcggggatgttaccgcagacgatcaggcgtcgggcgttgtggtgtagcgcggttgttagcaggtctgacagggtcgcgtgcttggtgcgtcgtccccccagcactggcaggatctcgtttccggccgcgtcgactccccgggcggtgtcgatgtctagccacactgtttcggggtcggggggccgatgtggggcgggacggcgctgctcctggtcgtctctcatggtttcctcctttgggccagggagcggccggcgtcgagggcgttcatgcgctcgcgttgttcttcgcgtagttggtagacccggcctcgtgacactcctgctgcctcggcgatggtggtggccggcaggtggccgatggcggcagcgtcggcaaggacgtcacgccaggccaggtcaatggttcccagctgggctagagcttcgtcgcggcggcgggtggcatcagccactacggaggcccaccctgtggggtggatggtcttgacgacgattcggttgtggcggatggggccccatgcatcagcggggacttgccagccgtgattggcggcggactcggtgatcttgaggcgtcgctcaggtgcgcgggtgcgggcagtgacgtcggtgttccaggtctggactggtacccacgtcccctctcggatgcgttcgatgacgcacgtggtgacctcgtcggtgactgtgatgaccagacgataatctttcccgtctggggtggttcggtagctgggcatttcaccctcccctatctgtcaaatgagctagacacagtgtctatttaatttgacgcaaagtcaagtgtgctagacgcctttgtgtggatccgcccgcccagacaggcactcacgtctcatgacccgccgcgacgtcttaacgaaaccaaaccgcttatagaaccgctccgcagcgggcccggagggcttcagttcgagggtgagaccgtgctcgtcggcccattggcagacttgtgtgaggatctgtgagccgtggccttgagtgtgggggacggcgtggacgcacatgagcatggggccgtggcggcgcgctggcggggccacgtaggctccgccatgccagtccggtgtggtctgccagcttcgccatgtcgcggtacgccagtggtgggcttcgagggccaccatgatcaccgcgacgacgacgagcgttgcggccccgatcatggccagctcaccctgaccaggccagttcccgcagatgatccagtctcttaacgcccagatgatcgcggcttccacgcctgctgcgatcgggatgagcaaggcagaacgaaggtgtcctgccatgatctcggtgatctcgctgcgatgccatgacaaggagaattcccacgactcttgaatcatgctgatgtgtgaacggcttcttcggcttcgccctgccatagtttctccaaacgacgctcagccagctcgtcgggacacggcgacagcctgccgcactcggagcagaccccgaagtggcgcgagagagtgatgaccggctcgtcgggagcatgaaccgactcgatgcccgggtgctgctcatcggtgagtcccgaagcgtggctgatctcgatcagacggaggtggaccatgccgtcgtagctgtcggctctctcgacatggaacgggtaggagccgtccgcggtgtggcctgcaaccaggtccccgatcttcaactggctggcggtcatggttcgcaccggcggcagcggggtccgggtcgcgttgatcctcatggtctctccttgcttctgcgccttcatagatgaaggtgccacagccggggttgatgtgcggaaccacagccactttttcaataaatccatcaccacggtctcaccccttcccaaatgtgtaaaccatgatttacacatttggggcatgatcgaacccacaaccatctccaccacgccccgcgtggccatcatctcccccagcgggccagcacggttctggggcgagcctcccagcatcgcactgcgccgacacggccggtcccccatgaggtcccttccttccggggccctgctgctggtgtgggacgtcaccgttttgaccgggcccactctcggccaccgcgtgcgtcctctcagtaaggacgccgagctgactgcccggcgctggctcgaccaggtcgccgacaaccccggcttcctcgacacccttatcgaggccgcccgcatcaccgatggatggcatcacgcgacgcctccgcacattcaggccccttaccggacccttcatcagtgaacggaggtacaacgacatgaccagcgacattgacattgaccggacccacaaacccgacgaccgcgccgaggctcctctttaccggtcctgggccaggagactcgtgcacgtctccgggatgccctggcgtatcgtcgccgccttggccggggtctcccccacctccatgcaccggcttctattcggccgcaacggtcgacccgtggaatggatcggcatcaatgatgctcgcgccctgatggatatcggcatcgatgatctcgcctcagcgtccaccgaccgtatcccggcccgcgaatcccgcgagctgttggtagccctgcacaccctcggctggaccgatgagcatctaagccgctggctgaccagttccgacctcgacctggccaccacccccaaggccctctacgtcacccggctatccgccgcccgcatccaggccacctacgacatgctcatcagccagcccgtccgccgctgcggccacccccgcaccccgcctatctcgtcccagactccggttacctcgccccagcccgggcccgaggatgccgaaacgttccagcccgccctgttcgagctagccgactgcgcatgagaccccacacaaacatggttgaatcgaagggctcagccagcagccagttaccaggagtccccgtgcgtctataccgcgctgttcttacccacaccgacatccagatcaccgtccgcatctggagcaccaccgaccacgactggacctggactcccctcgacacctggacccccgacccgaccccgaccacaccagcccaactggccgacgaactccaccgacacggatggaccacccccgaggaccccaccaccctcaccaaggtgactgtgatccccgagaactggcaggccctcgtcgaccacgccctcgctgcccgaaaccaccaagccaaccagctgcgcgtcgccgagaacatcctcaccgacatcctcggcgacgccgccgacgctggcctttccgtgaccttcctcgcccaggctgccggattgtcccgagctgccttctacaaacgcagcgctaagaccatcaactctatgaggcacgccgaccagccgcgcgaagacccctcccagctcacccgagccgagaaaacagcactcagcctgggcgacgagtgatcctcacacctcctgcgacagcccggccgtggagccttcccacacgtgtctagccagcactgaccgggaaaacctattcgcggcaccacaccgggcccactcaccagtcacctacacccccgactgcccctcgcgaagacccaaccagcgaaccaagtccccaatgcgcccaccacgatcagcacacccacggcgaccaccaggtgggaagcactaaccgaccccaacaacccaagatcaaacaggccctgcccgggaacgccgagcagcccgtgatcgcgaagccatgctccgagatgaccgatgattttaggggccatcttcttcagcagggctatccctccgataccaacaacgatgaaggcgaggatttcttcgcatccgttgtttccttctccggtggggccgttcatgctgccttctcggggtggacggccagccagccgatgaggttgtcggcgacctgtcctgaggtttcgatcagttcgacctgtccggcctgccatgcccgtgatgtgccggccagcaatgatgccggggcccctgctgcgcggctgagagaagcgacttcagtcaaggcggtgcgtagctcctcgatggcgctttcgatgtaccaactgccgtcagtactagtctcagcggcatcggtggtagcgataagagcatcggtgaggtcgtcgacggcgcggtccagatcagcgatgtccggtagggctacaggagtcatggtgtgtcttccttctagggtgccttcactggtgaagggtccctagccccggccgatgtgcggtgctgtgggaaaaatgcttcccattggtccgtcttagttaggaaacttggcctaagtgctgtcgagggtcgcgtgttcgtgaccggttcgaagacactgccgccttgccttcttgtcagtggcgcttccgagatggggtcagtgggcgatggctaggccgatgagggcgccgctgcacaggctgggcgcccagggaaggaatcgggtggtgtggtgtcggaaccgatcgattagggcatatagggcgatcagagtcagcccggcgatgaccgtggcgtggatcgtgtcgatgccggttgctgcggccggggctgcccacagtggtgtgatgcgcacgtcggagaagccgaagccgcctcgggagatgacccagacgatcatccacgctgcgaagatgatggcggtagcgatgacagcacgtatcgccgcagtatggtccgagagggcggtaacgactacagccccgatccatccggcccatccggtccacgctaggactgccggtatccatgtggtgatggcgtcaatgacggcaacccatgccccgatggtggctagcagagcccaggccggccaggtgggtgctggggcccacgctacggcggcgatcatggttgtcgcagatgcagcacagacagcgatcaagcttcggagactgtaggtgtcgcggtaggcgatcttgtcggggctggcggtagctggttctggcaggacgcgggtgagggcaggccaccctgcggccgcaatagccatcacggcgaccacccacacaatctgttgcatgggtctcatcatggcccatcaacgccgaaaatgggtggccgacatgggttcactcgtcaagaggtgtacgggcggccgtggcttctcctgcgccgagcatgagggtgccagaatcctcgccagccgattcccagtcgacgatgacctggtcgccgtcaacgctggattcggcgatggtcacccattgcccgtccatgtcgatgagcatcccggcggccagctctgtggcggcaaccgggtgggctgggctgtagaggaggtcgatgtcgcgggcagggtcgtcgggttcttcggttacctcgggtggggtcgatctggctgtctcggtgtcgtcggccaggtcggctcccaggatgcgttcccattcggggctggttttcttgcccgctgaggccatcgtctcgtcgatctgttcgtcagtgggccacacaaatttctttttggtccaggtcgtggtgtcgggtcgcagctgatccagcagttccaggtcttgcggggagtgggccttgcgggggtcgggggtgtagaagaattggacttccttgggggctgattcgccggataggtaggtgccgcggccgcgtttgccgaacgggatgcccacgccgacgtgttcggagccgaacatcatgcgggctccgtcagcggacaggggtccggtggcggcacgcccggagaagttgtctcggatttcgccgcccaggaactcggcgtcggggcgttgggtccccagatcgacgtggatacggcaggcggctgccatgcgcagcagggagccgatccagccgaaaacggggcattctccgggcatcccagagaccttgatcgttgaccaccagtttttcgcgttgccgtagaactggcggtactcgtcgatgaggaccagcacgcgggtgaagtcggtctcgcgagccccttcttcttcgatgcggcggtagcggtcctccatgagagaccacagccagtggatgagggcgacctggtcggggacggtagtggcgaccatctcgatgttgggccactcccgcaggcccaggtactcgatgcgtttagggtcgatgacgaagacgcgccagttgcggcgggcaccctcgacggcgtcgccgatcatggacaccgtttttccggtacgggtgcggccggccttgagctggtgggccatgacaccggagatgtcccagaaacaggtgttgccgtcctcgtcgacggcctgggggattttctcccagtctggggagtctgggcccggaagggccacgggtcggggcaccatcgagggcagggggtggcggcgggtgacggtgatggtgtcgtgttccaggtcgaagtcgctgcgccactggccgagcatcatcgccgaggtcaccgcggccaggcgcaattggatgttcgggctggacaaatgggcgccacgttggtggtgaatggtgaagccgtccaggttcccccgatcggttttccaggaatcgacggtgaccgccgacccatagatctgagtggctacttctttagcccgttccttgtctcggtccagatcggttttgtcagggtcaggggtcggggcgcggtattgcaggacgaacccgccggccgggatcgttgcggatgtcaccgtgaactctgccggcgaccaggcagccgcggccgcctgggtgagggccattggcatggtctcgacggcagcctcctcgggggggatggtgagggtcaggcgtcgcggatgcgtcttcttgcgattccatgtgactttctgcctcaccggcaccttcgccgccgactgaatggctaggcgagctgattcggcagtttcggtacgccggccagcgcgtagcgcccgtcgtgcgtgaaggctgcccaccacagcacagcccatacacggcagccaccagcgcggatcagcggctgctgcatagcccccggtagctagtaccgcacctgaccagccggccgcgatacttttccacgccggtttcgcgccaccaggaccagcgttatggacggtctgcttcgaggctgcggagggacgagacagcggagtgctggtcatgccgcggcctccttgtggcaggtcatttcacaggcatgccggccagcgatgatgccgtggcgcaccgccccggtagccgcatagaccgcgcacaactcaaacacggggcacccatcgcaggccgccgggttcatgctttctttgtcccacgatggtgggtcatcggtgcacggcacggccaggccatcctgttgagcggcgctgatagcggtgaataggcgcagctgggcgcgaacttggtctggggtcaggttgacggtgcgggctacacgcatggggttccttcctcttcaccagtgaaggttccctagacccggccgatgtgcggagggatttcagtgttttatcgaggtgaccagccagccggtctgcgctgcgggttcaggtaccagggtcagatgcagcatggtgtggtcggctaggggcacggcgaccaggggcccgtcggcgctcgccccggtgagggtgggagttccggccacggtggtggcgggaatctggttgggtttcgcggccatcagggagcccatgagggtcggggcggcgatctggacgagggcgactttgcgggcggcgggatcgcgggtcaaccagccgcgggtgaaggtgagcgcagccgacgtgatatcggggctcagcggggctggtgtggcggcggggtgggccgttgaggagggccatacgcgcggtagcgctggcgacatcgagcgggtcggagtggggtcaggtgtggggcttagggtccgatgtggcgatggggctaccgccccggtggtgggagacgagactggttgggggtggtgttgagggcgtgggatcagggtgaaggcagccaaactggccgggatgaggatgacggccgcgccgacacttcggagcgaggtcatgtgacgatccttcggtagctcgacgggttgccgtagatcttttccacgttgatgccactatgtgggttgtcggcgctaaccatttggcctccaccgatgtagacggccacgtggtgggcagggcttccccagaggatgaggtcgccgactttgagctggtcacgggccaccgcggtgccgactttctgctggtcggcggcggtgcggggaaggctaatgccgatacgccggtacagcgccgaggtcaggcctgagcagtcgtagccgccatcggctttgccgttgccaccccacacgtaggcgtaggagttgttgtcggcgatcgatttggcccatgccacggcttcggccaggttcttcgacacaccggtctcgttagcggccccggtggcacagttgtttgacaggtgccctgtagtagtggatcccactatttgtttggccatggtttcccatttggcgtaggcatcgggcagggctgagccttgcactgcctgagctgcctgcgtcagcggcatcttctgccagtcagcgatgtcgactaaaccgggaatgtggaatccagggccgccggccgatccggggccagcgtaggtgatggtgtggcctttcaagaacgcctcggtggcgtaggcatcattgttgacctgatccagagtcccgtaccagcccggcaggatgcgctgctgaaaggggccggcgtcaccgtcaccgttagccttcgctgaggtagggtcggccccaagatctgattcttgtttggcggtcatgatagcgatgaccgctgcctgggtaggcagtttgtcacgctggaccacagtgacgatggtggtcacgagctgcttctgcctggccgtgaggcctccggcacccacagtgcctccggtgacggtacccacgcaagcatccccgccgacactgccaccgccgccagagttgtcgtcgagggccccagagcctactgacagcagcggcacaatgatcacggtcgcgggcaagaccgccaggcccgccagcatcagcactgctgcactcaccacggcgatcacgtgagatgctttcaacgctgcccacctttcgctggtttgagggggcgacgcctgctggtacgcacaggcttggttggtccagtccgccgttggttggcaggcctgggtttgatcggcttgctgggacccggtttgggctccggagtcttaggctccggcttcacatgcctaggcacttcggctgcggtgggaggagtcagcacgtggcgtaccggcttggtgaccttctgggcacccgaaacaaccggcttagacaccaccttggcacctttgaccaccggtgcggctgccttcgcgccggccttcttgactgcacgatgcgctttgatagccccggcctcggcccggccaaccctgctagcagtagcatcgagggctctgtggcccgtcgttgccctcaccggtgcatccttgccctggcgggtctgcttagcgatcgccgacatgccgcctcgcaatgccgaaacatgattgtgggcgtgggcgatcgccgacatgccggccgtcgcgatttttgactggccctgcggggcccctgccccagcacgaatctgctggtaagccgccgacgtgccacgagcacccgccgccattcgcgccaccttcgcagccctagtcactcccgtcgacacgccacccgtggctaccgcagcagcacccgagaccacagtcgaggccatccgccttcgacccaatccggtgagcttgcgaccaccgctgcgcaccatccggcgagcaccccgcccagcccactggccaatcgccgacgccccttcggaacgcttgctgcgcatccaatcgttgatcttgtccctcagccccttctcgcccttgtgacgacgccacatggacatcaagaacccgataatccccacgagctcgagcatgttgacaaccatgaccttgatggcgacatcaccgtcagaggcgaaaaccgacttgatgatgagcatgaccacacccaacatcaccatcgacccgacaatgccgatcatcgagtacaagatcgaacacagatcccggatgagcggatctgtgcggccagggatagcccgcaacacgttgagcatcgacatgaacgccgaccacaccaacttgcacacgtagaaccagcacatgcccgcgaacaccagcaggaccacagccaaacccgccaccgtcgacgagtaaaagaagaaccccaccaaccacgaaccatccgcaatatcgccggcgtaatccgacaacccctcatcacagtcaccaaggtcgtcgcgagcatccgagacgtcatcgtaagggccacccttgagcacctcgatgtacttgtcgtggcacttcgcatcaataatgcggccatagttgagctgctgatgaaccggcgccacgaacgagtccacaatgatcgccgacagcttcggatccttcgagtctcccgtcgaggtcatgtcatcaggaatctcgacctcaccagcggtcgccgtcgcaggatcaaccgaactggtaatcatatgagacagcgccacaccgaactgctgggtgcgagccagcggagtagccaacgtcgtcgtatcgcctgcgaacttcgccaccggggccgccaagaaacccaacgccagcgccgcagcaatcgccgcacgcgcacccgtagcccacgcccctgccgtacgtcccctcatcatcttgacgaccacgcccacaccggcgcacgtcgtcagcaacgtcaacaccgttccaccccagctgtccgctcccagcggggccaaaaccttgtcgtggatgtcgttctgtaaccccaccagcggtccggtaatccacccgacccagctcatcgccacggtccagtccaacaaccggcacaacagggcaatgaccatcaggtacgtgttccaacacatgccaataatggaggcccacatagccttcagcggggccgtaacgccaccatcgtccatcgacatctggtactgaaacaagtgaataccgttggagtcagtcacattgaaaccgtcacccatccagcccagccccgggcccgatgccatggcaggcacactgctcagcgccaccaccagaaccagcgtggtgacgatgatacggaaccgccgctccccggccccggggcggcgtggatgacggctcacgctgtctcctggtcgtgctcgggcgggttggagctggcggcttcgcggtggggagcgtaggcaggtctcagtagtcgaatttcaccgacgttgccgtgttggtcggcgtacaggccacaaccggggcctccggggttgagggcaatcttgaccaggtcagcgaactcttcaggggacgttttagggtccacgcccaggaactcgacacctttctgggcgaggttgatgttgtcgcacagcaacacgatgcgatgctgaatgaggttgcggacggtctcgttggggtaatcggcctcggggtcgtgggagccggtgataagccaggcattggctcggcgggattcgcgcacgtactcgtcaatggcgtgggaggcttccggcgaggacgacatgtgatgaaactcgtcaacaatgaaagcggcgtcgcgggcccggtcgctgaagcacaccaggcgagccagacgggcaatgagcgcgtagagggctcggccaaacaccttgtgcgggggcagctgccgaaacagatgttctgacagcatctcctcggcgttaggaagagcgatgccacaagtgccaatgatgaggatgtcggcactcaggtcggcgggaggaaggtccgggtcaaagatggccgaagctagggaggccgagttctcgatgtcagcgaacacggcaatcctgtcagcgatcgcggtggcctcgggaaggtcgcactcctcggccaggtggcgggccaaacgcccacacgaggtgatctggtggtcacgcatgtaggccggtttgaggaccttggccagcgtggtcccggccacaccgatggtctccaagttaagcaaggtcagcaagaacgactgggcgacctgcccggccatctccgggggaaggatgcgcagcgggtccagcgacagcttggggtgggccgtgtcgacgatctggcgtctaaccccgtcgatagagttgacaaaggttacccactcccgctcatcggagttgtcggtggcaataatgcgcccgccccgggccgcgatggctgcgcacagccgcttctcggccatcgtcttgcccgcgcccatcttgccgatgaacgccaccgtgttgcctttctgatcctgagtgtcggcatgcaaatcgaggtaggccagcgactgcaacggggagcctgtgaccacagccaacgggatgccggtggtacggcccaaccggtactcaaccaccgggatagatgcggcgaacgcggaggcgtgagtcagctgacggtaggcgttaagcgaggaggagaaccggccaccgggccgggcagcccacagcaagtcctcctgacggcccacgggacgcacccacgtgaagtcaccgaacaccggatcattgacgaacgctcctgccagctcctcggtggtctcaaagtcaggagacgagacagtgacggtgataagagcctggatctcgacctcacgctcatcggcggccagctcggcgttgtagtcgacgagcacctgagcggaatgctcgatagacatgagggtcgaagcctgggtcatctcaccgccctcgacgttgtcgagctgatcgaccgtttgacggatagcccgctgatttttctgcatcgcagcgtgacgggtccgggccactccccggatcgccacgtcgaccggcacgccagtgtcgtcgatacggcccaaaaactcgtaggcaggccacgtcatcgtgcggggcaccttacccagcacgatatgggactggtagacggtctcgccggtgtcggcaccgattttgaggacgcgacgattccacgcctgagccgtccgggacatgtgggagactcgcttgtcatcctcgctggccagcaggtcggaggtcgcggcctcatcgatgaccaactcccccagcgcggcacgtccaacctcatccatgagggcgattccctcgccaggggcatcatcacgcaaccgggtcgggtggcctgacaggtgctgccgaagccagatctgttcatcaacggtgaccgggcggggttggaacgctgccggcagtttcgcaccgaattccttagcctgacggagggcccactcccgtgcgacacggccaggagcggtggtcatgagtccggcggcttcggtgattttgttgagggcggcggtccaggcggtgtgggtgcgtattttctggtcttggttgagtttgatcgataggaaccacacgcgccggcctagggattcggtttcaggctggtcgagggtggcgtcgatttcgtcggcccacacggggtgttcgctcaggtcgaggccggcggccatggcgtcgacgatttctgtggggtcggtccaggtgagggctccgttgaggcagaactcgtggcgggcgaggtggcggaataggtcgcggtgagctgcggcgacggtgagggaggcgttctcggtgacgggtcgctggaggggagtgagtcgccaggtggcccagatgtcgccggtggaggtccagacgaggttgtcgaagaggaaccgttcggggatggacatcatgactccttttcggcggcggcgaggaaggcttccaggccgctgcggcgtacagcgttcccggtagggtgcaggggttttctgggggtgggttcagatttcgaatgtgggaggggtttgtggatggtatcggtgtcctcggcgagggcttggtcgagcaggcaggtggccggggtgtcggtagtctcgtccagctcgtcgatcatctcgtcgaggaggttgggggtggtggatgcggcccacacaggtgggatagccggtgcgggtcgaggcggtgtggggaggcggagtttggtttggccccagaggggtgtgtgggtcatgccggcgggagtggtggcggcgtgagtggtcacacgccaccagcccgccagccatgccagaggtgaccaggtccagtcgatgcgaccaacaacgaactgggcgagccatccggcagccagcgcgaaaatgaaaccgcggatggtcatgcccccgtcgataattttgaagcccatcattgcggcaggaactacgccgccgacagcgagcacctgatagatcgtgtagggcccgccaggaatccttcgacctgaggaatccttaccgataatgcggggctgctggcgggcctcggtgtgccactgaatatccacgatcagctcttgcccaatccttgcatcatctgtccgaagaattggatcgcgttaccttcgataagccagtgcgccataccacacacaaacagcatggagacgatcttggccaggctcataccgtgtttgaagatgttgaacgcggcaatgcccacgactacgaccatggcgacggctcgcaccgcggactgaccttcacctgccttgatcgtcgtccattcgaagaggttctgcgattccagtggcagcaggaggaattgatcgagcatgagaggttttcctttcaggaagccgaccgggatggtcccggtactgacgggctggacggcacgggtgtgccggccaggggcagaaggcgtgacggctggtcgagggaggcaacctcccagcggcctgcacggctgacaagagtcaggccgtactggctggtccgggtagtggattcgtcgccggtgggctggcatgtcacggtcaccgtgacggtaatcttctgccggtctgagggggtggggacctcgtcaggtcccaccacatgagtggttttcactgatacgcatggggctgggtcaaccgcggtgaaagcggtccctgggctgctccatctcgacaggtcagtattcccggtcagcatggcggttaggaagcctgaagaggcttgggcggccgggtcggcggtgcgaagctccgaggtgtctagggtgggggccgaggccggtgcaggcatggggatctgtccaggtagacgcaaggcgatggccttgccgttggaatcgacgtggaccgggactgaccaggcctgtccgctcccggattggccgcccatggtgaccacggtgacctgccacaggctcggatcagacggggagacggtagcgtcataggcggtgacggtggtgggcgctggaccaggtttgcggggcatgcgcgcatcggtgatcttggccgccaccaggtgttccagattgtccaagtgcccggagtcagaggtcagcagaagagtagtcacctcgaccgcggtggctgaggcgatctgagctgtgcggcggtcgtgatgggtggtgtcagtgctgacagctgtggtgggagcggatgccggggccgccgaacggaccagggcaacggggccgcatgcgactccgcacagcacgagggcaaggaagcctttggtggccatcgatccggtgtggggccagggacccacgttttcctgtgcctgttttttcttggccgaccaacggcgggacttagggttagcggatgcaccttctggggtgcatgctcgtctcaatcgcatcggtcacctccttcactggatgaagggaccaaggaggtgaccgatgtgcggtcgaacccgaaaaagttcaaacttttttctgggtctgcctcaagtacgacagaaggcctgcatcatcacggcgttgtggtagcagatcttgcgtcagcgcaaatgtatgggcctcgtaggagtagctcttaggtgggtcccggtggttgcggccagggcgagggtgtcgggtatgtgtagcgctagtcccgggttcgtggtgtgagggcttttgggtgctgacatgcactacccattgctagacgctgtgctgtggcatggctggacgtctagcagacgggttgacatcacctttaggctggcagcgcccgaggccgcaggccagaggaagcggacagcctaacgattgacgtccccctctcctttccccaacctcctggatgtgtgggatcagctgtgccgctcccccgacatggcagacagcaccgttgcatgagaactgactgacactgtggcgccgcggaggtctcccgcggcgtccgctggggcgagtgcatgcctgtcagctcatcttttatcgtcatgtttccccttgtcagagcggtctttgcaaagtgacaacgtcaggggtcttgacgacaacatcctcgacaacatcgtggcggtggtctgtgtctcgtcagttcaacgcaccggggaaagaggcaccgctgatgttcaccaccacaaacaccctcaacgatgagtgggaccagattcgcgccactgagatcgattggcatgactgccctgaactgatgcactgcatcgacgttgatgatgtgttggccgtcattcctgccgcccccgacgccatcttgggctacctcattgcccgggctcagggcggtgacgagttggccacccgcactatcatccaagcgttcacaggcaagcttatcttgatggccacggccaccaaggtgcgccgtactaatgacggcttcaatgatctgttggcgggtctgtgggagacgatcatcacgtacccgttggatcgtcgccctgacaagatcgctgcgaacctcatcctcgacacgttgcaccgggttacccggttctggcgtgctgattcccccgatgaggaagaggctcacggtctggtgcccttccctgacactctcatcgccccagagcccgatgaggacgtcacagctagccaggccatcgccttggcggtggaccgcaactggattaccgaggacctagcccgcctcatgagccatatttactgtgacggtatgactggagctgatgcgggtcgtctgcatggctgcgctccagctacggtgcgatctcgatgccgtgatggtcgggccgtgttgcagcgcaacgccgagacgatcctggccgtctgctgatccctctcttgctcatgcctgccgccaccctacccctacctgctagaaacatagccatgtctccagcaacgcatctagcatatcttctagcaattgatctagctatgtatatagctgatgatctagctatcatatagctgtgtctccagcccaaaggacagcccaatggcatgcttgccacaggaaggtgcgtcagcctcccgaaatactggaaggagctttaccgtgcaggacatgacctcgaccagaccgattgaccgatccccgttcgaccgcactattgcggtgtggaaccacaaaggcggcacgttcaagacgtccgtcgtggcgaacctgggatacctgttcgccgccggtggcaacaaggtgctgctggtcgacatggacccccaggccaatctcgacattgacttcggtatacccgcgggagaacgtgaacggggcatgggattagccgaggcgctacgtgaggggacggcccttcccccaccgcagcatctcagcgaaaaccttcacctggtcagtggcggcgctgctctcaacgagttcaccgaccccgcatccttagcggccatcctcgaccgagtcaccaccgcacgctacgacctgctagctcaggcccttgccccgctggcctgggactatgacctcatcttcatcgactccgggccggcacaaactctgctgtcccagaccatccttggagtagcccgctggctggtagtgcccacccgcaccgataacgcctcaatcactggcctcgtcgacgttcaagacgccatcgacggggttgcctcctgcaaccctgaccttcaactactcggcgttgtcctagccggcgtgggggcccgggccacccggatcgccgcagataaacgccacgccatcgacacagtgctgggggcaggaaccgttttcgatgcggtcatccactactccgagaaggtgtccgtgctcgcacgccagcagggcaagaccgtcgccgagctagccaacgagtaccacaacacccagcccgcctacacctacctagctaaaggccagaacatccccaacgtcgccaaggcagccgtcagcatcgaaactgattatctgaggctggccaccgagatcagcgaccgcatgttcaccagcgacgagcaggagcctgatcatgactgacgatccgactccatccgagcagaacaaccccaccagcgacgacatgcgcttggccgaagaatgggccaacagcggccgcacagtgggagccctgccgcgccgtcaacggcctcagcgacccacaccccgcaccaccagccaaccccctgtctcgtcccctgacacaccggctccgaaaaaaccccagaagacccccaccagccagcctggccgtcaacggatcaacgtcaccgtctacgttgtgcccgaactccatgagcggctgcgctcccgatcggcggcgacgggggtgacggtctcggatctggtggtgcatgcgttagcgttcgtcgccgatcatgcgggggaggcgatcgccgatgatctgcgcgtcgagacgggccccggcatgggggccggactgttcgatgtgaccccatcgcggccagtaggggtcgccaaaacccagctgggggtgcgaatgacccgccacaacaaggatggtttggaccagctgacccggacgagtggagcccgtgaccgcagccatcttgtgtctgtcgccgtgcgcgactatctcgactccaaccctgtaaagaaaggccgacatgtccgctgatgaaactcctgccgcccggggtgggcgacgctttgatacgaccgtcaagcccaggcgccgtcccatgcttatcgccgccggtatcgccatcgtgatagtcggcgcgctcctcatcactcagttgattcgctccgcccaaaccgagcatcgcgtgctggaagtccacgccgatgtggctcgcggcgaggtcatccgtgacaccgatctggtatcggtgactgtcggccaggtcgacaacgtatcaacggttcccgcagaccagctcgactcactggtcggcaaacgcgccacggcagatcttcgagccggatcactcttgcctgctggggctatcggcccggccgatgtcgttccagctccgggcaagtcgctggtcgggctgaagctagccgccggacagatccctatcggagaccttgctgccgggacgaagctgcgcctgatccagacgtcggcacccagcggctcatccaccaccactgatagcagcaccaataccgatggccagtcgtgggaggcaacaatggcgaccggcaccaaaaagaccgagcaggtcaccttgatcaacgccgaagtgaactcgcgtgatgccgcccggatcgcccaactgacgtcacagggccgtatcgccgtagtgaaggatccgatccgatgagcaccattgttttgaccagcgtctcgggagccccaggggtcaccacgacagcgatcgggctgggcagggtctggccacaatcgagcctggtcgtcgaggatgacacccaccacgccatgctggcgggctacctgcgagcctcccagcacgccgaaccgaacctggccgcagtggcgaacctgacgtcgactccaaccaacgcccaaacggtgtgggaatctatcgccagacccctacccaccgatgacccagtcggcgggctgcgacgcaaaggcatcctcggcccgcccacgccgtggtctcgcgcaggcatcgacccccgatggggattcatgctggccctgtggcggcaactggaggaggctggcatcgacaccatcatcgatttgggtcgcctagccacaccactgacctcaacgccacacctgatcgccgcacccatcgtcgaggacgccgacatgatcttggtgatgatcgaggcgacactacgcgacatcgccggcgcccgcacgatggtggagggactcgctgagcagatgaacttggccggcgcctaccgacgtctcggactgcttgtccaccgtggcggccaggcccgcggcgtcgccgagttcaatgacaaggagatcacctcggcgttacgactcccggtcatcggggccattacccacgacccggccggagccgcccaactctccgacggggtcgggcagcggttcgacaagtcacgtctggcccactcactatcaaaggtggcggccagcctcgtcgatgccataaacaagcgccacgctgatgacgaggaggatctgtgatggccagttttgctgataatccgttcgacaagctgcgctcccaggatgcggcaagagcttcggtagagcaggagcctgatgccggattagcgtcggagttgttttcgacgtcgtcggggtgggccagctctcagcaggtgtcccaagctcaaccggtgatgacccgttcggagaacgtggattggccggttgtcgcggagctagccagtacggccactgatgaggttgaggctgagatcagcaggtggagttccactcatgatggggtggcgacgctagacattcgccaggccatcgcggagcctgctattgcctcggcggtgtctacgtatgctgaccgacgccagatcgatgtaggggagacctggcctgatctggtacgccagcgataccgcaaggctgtgtgggatcagctgttcgggatggggcggttgcagccgctgttcgaaatcagcgacgccgaaaacatcatcgtggtgggtaaccatgaggtggttgtcgaccacaacgatggttcccggtcaacgctgccgccggtggccgactcggatgccgagctggaatcccagatcgcccggatggcgaggaatgcgaccccgcggcgagccttcgacgccgatcacaccgatgtgacgatcatgcaccaacagaagttccgtatccacgcgatctcttcggaggtgtcgttgcaaccgtcggtggtcatccgccaacatttgctcacccaaatcagtctgggggacctgtcccagcggggaatgatgccggtggaagtggcccggttcctcgatgaggcggtacaagctggcaagtccatcgtggtcgccggcgagcagggggcaggcaagacgacgtttttacgagcgttgatccacgccattccgatgcgggagcggttcgccacgttggagaccgatcaggagttgttcgctcatctgatgcctggccgggaaaacacgctggtgctgttcgcccgtgatggtaacggcgaggtggatccggcgactggcacccagcacggcgctatcgagatcgcccagctgattcctcctagcctgcgccaggcgttaactagggtcattgtcggtgaggtgcgcggcaatgaggcttcggccatgttccaggctatgcagtcggggactggcactatgagcagtatccactccccgcgagcctctgaggtgccgtcccggctagcccaaatgatttcgatgggcccggtctacgatctggatcaggccatgctgcagatcggtcattcgatcgactacatcgtctttgttcgtaagcgtgacctgcctgatgggagccggctgcgatttgttgagcagatccgttcagtctcgcctggtgattcgacaactcccagtcttggcgaggtgtacacggctgactcgtggacaggccagccgcttacgccactcatgcctggttcggccgccgacgagctgtctcacttcgcccgagacctggattactgcgaggcccactcatgaacactcccgcactaaccagcgccctcatcgtgaccgggttggggctgatcctggccatcgacgggctggtcccggcgccgcctcgacctggtgccccgctgagcccggcccagaggtgggctcggctcacccaccgtcccacaggagcggccgggcgtcgccgggatttgcgttgggggttggctgttctcgtcggcgtcgtgctgtttatgctcaccgggtgggtggctgcgctggcgttgggccccatcattgtgttgttggcccccaccctgctgggggcggccccaccgaccgatattccgctgatggaggcgttggatcggtgggtgcgtcaggtcgctgcggtgctgccacaggggcgagacatcatcacagcggtgcggatctcacggccgcgggccccgaagctgatcgccgggtcggtggatcaactggtgtcccggttggatggccgtatggagccgagggaggcgttccagcggatggccgacgagctggactcggctgaggctgacgcggtgctggcctcactagcgttggcggccactcatccgcggggagcctcgacaacgttgaaggctattgctggcaacatccaacagcggttgaaagtgctgcggcaagtggaggctgagcggtctaagccgcgtaactcggtgcgccagatcacactggtcacgatcgccatgttcggggggctgctcgtgatcggacggtcgtttctggccccgctggcgacccctcccggtcaggtgctggtggccgtggcggtggtcatgtatgtcatcgcactagtgcagatgtatcggatggcgcggccccgtcgacgcacccggatcatggtcaggaggacccgatgaccattactgctttgtccctgctggccggggccatcgtcactgtcggactgctggtcatcgtggcagcgttccgcccagccccaggccctgacctggttgccgctctggaggtggtgtcgggtcgcacctcaagcgtcgccgagaacgtcgaccagacccggatcgggcggataggtcgcagcgtgacccgcacattccatgtgtcggtgtccccggccatgcgggccgcactgcgactccaaggcacgacccccgaagcgttctacggtcgacgcctgatctgcgcactgatcggggcgatcctgccgtggctgctcaacgcggtagccatcgcggtaggggcgaattccccgaacctactcatcccttcggcgctgtgtgtggcgttagctggcgctggatggatgctgccggcagcacggttgaaggctgcggccgggcccaccaacgatgactcgttcgaagcgctgctggtattcatcgatttggtcgtgctggaacggctcgccaacgaaacctccgtcgacgcgctcaccaatgcggcaaacatgtcggactcgccgctattcgtccagatccgtcaagtcctcaaccgtgcctccctggaaaacgtcgacccgtggaacgggctagaccggctagccgaggacatcaaactgcccgaactcaccgatgtggtctccatcgcccgcctccaaaacgaaggcgcctccctcgtcgacagtttccgggcccgagtcgccgagttgcgcgacgcctacctgctgcgcctgcaacaagaatccaccgccatcacccagcggcttggtttgtggacgatcctgcaagccggctcggtcatgctcatcttgctgggggcggccgccctcacactcatcacagccggataaaccgacatcgtgtcgagcccccatatgggccgcgaacctttcataatgatgcctgtaagcaccacaatattgatcacaacctaacaatgaaggagaaatcatgatgaccgatctcgacctggctaaaaaacagatcacctggctggcggcgcacctgcgttcccggatcgttgacgagcgtggcggtggtagctctaccgtggagacactgatttggattggtgtcatcgtggcgctggtgattggtgtgggcgtcggggtgacggcctatatcaggtcgaagatgcctcactgacgacgatgcgtagcaggttcacaactgatcagcgtggcggtggtagcgcgtcggtggggatgctcctgctgatgcctgcgatcatgctgctggcattcggtgggatcgaggtcgggatgtggtgtcacgcccatcagtcgaccatcgcggcagcccaaagcgccgcggaggctcagcgtgtcgtccatccggtcccggggtcggcacaggaggcagcctcgcagatcactagtcatggcggggtgcgtgatacccggatatcggtcagtgatgacggggccactgtcacggtgaccgtctcaggtcgggccccatcgatgctggggctgcatcttccggctgtgtcgtcgacagcgtcgatgcccaaggagcgcctgtcgtgaggcgaagtgagcgcggtggagcaagtctaagcgtcgaggtgctcatgtgggcgccgatcgcgctggtgatcatcgggtttgttgtgggtatcggccggatgtcgatggcccaggacgcggtgaatggcgcggcgggtgctgcggcccgtgcggcgtcgttggagcgtgatggacagtcggctcagtctgcggcgcagcaggcggcgtcggcgaacctgtcgtccggtgggctggcatgtgcgccgagtgtgagcgtggacacgtcagtgtttgcccgtcctgccgggcaggcgggcacggttcacgccacggtcacgtgtgtcacctcgctgggtcttgggttcgggtcccggacggtgcacgcaacggggtctgccccggtagacacctatcgggaaaggagaggctgagatggcccgtgatgagcgtggtggcggctcggtgtcggtgtggatgctgctcatggtgccggtgattctggtcatggccggcctggtttttgacgggtcccgtcagatatcggcaacccaggcggcccaggacgcggcggttgcggcatcccgcgccggaactgatgcggcagcgacaccgcagcttgctggccacgacggggcggccgtagcagtccaagcggcccgccaggcactatctgctgccggggtggacgggtcggtgcaggaggacgggtcgaccatcacggtgaccacgtctcaaagtcggccgacagtgttcctgtcagcgatcggaatcagccaggtaagggggcatgggcaggcccatgctcagcttgtgggaccgggagaacgcccatgacagtgatacgtcgtatcggtgccctggtggcactgctggtggtgatagccggcttaccggccgggctcgtggccgcaggcgccccgctagtaccctcgggcctgtcatgggcccatgtgcggcatctgttggttaccccagacatgaccgggtcggtgctggtgtggctggtcagcctcatcggctggatcgggtgggcatggttcgccctggccgtcgcagccgaagcggtgacgatgctctcagggcagcggctgcactggcacatgcccggccctcgcctagtgcgccgagtggcagccggtcttctcattgccgcgttcgcggccgcaccggcagccacaagcacggctcacgccgccgaggccacccatgtggcggtcgccgcccaggctggaccggcacacgcggcccccgcccaggacagccccgccaccacctctcaggccccggacgcctccaccactccgaaaatctggaagacctacacggtgcgggccaacgactacctgtggaagatcgccgagcactactacggtgacggcgcccaattccgtcgtatcgccgaagcctccggtatcgacccgcactcagagctgaaagtcggccagaaactgatcctgccggttcccgagaacacggccgcagttcattcggttaaagcgggggagtatctgtgggagatcgccgagcactactacggtgacggcgcccagtaccataaaatcgctgaagcttccggtatcgatgcccattccgatctagccgtgggccaaaaactcgtcatccccgggcccctccgccacgacgccacgccgccacaccactcggcgtcgacccacgcgaaggccgccaccccagcccacacgcccacgcgacggcctgcgcctgcccacaaagccacgcccgccccgacgccggccaccccaactactccgacccacacggtgaccccagctccggcctctgccggccactcgaccagcgacgagcacccactccatacggataccgccgcagcggacaaggccagcaacgaggacgccctgtccccaatccaggtgggtttgaccgccagcgtcggactggtgctggtcgccggactgatcaccaccctcaaccgccgctaccggacccggttcacccgccagccccgcggcaaggccatgaccctgcccagcccggacgcccaaactgccgagatagcgctgcgcagcaccggggcgactgacactctgacgatcacctgcctcgaccaggcgctccgcgcgatcggcgcatggtgccaccactgcgggcacccgctgccacccctgctggccgcccgcgtcgatgacgaccggatcgacctgctgctatcccaggcggcccccgaccatcccgaggcggtggagctggccgccgacggatcggtgtggaccctcaccgccgaccggatcgacgacctgctagcccacaccgatgacaaccaagcggctccgtggccgtctctggtcacactgggacgcgacgacgacggcgcccacatcctcatcgacttggaagccgcaggaaccttgcacctgatcgccgatgacgaccaggtcgacgcggccctcgccgcgatcgccgtggaactggccacctgcgactggtccgacgaagtcaacgtcaccctcgtcggccaggtgtgcccgggcctagaagacgcactagagtctccgaccctgacccgcgccaccgacgtggacaccctcctcaccaccctagaagctcgcgccgacgaccagcgacacatcctcaccgaaggaaaccccctcgccgctcaccgagccgaccccgccatctccgacgggttcgacgccgaagtgatcctcctcgacaccgaactcaccgaagaccaccgcaaccgcctcgccagcctcgtcgaggctcttccccgcgtgtcagtcgccgcggtaacaaccagccccaccagcccagacgaatggtccctcaccctgacaggtgacccactagccgccgacctggctcccctcggctggcacatccacccccaaaccctctcccccgacctgtacaaccgcatggttgaactactcgccaactccgccgccgcagactacgaacccgccagctggtggaaccacgacgccgacgacgagcccaccaccgaccccaccaacgaggaagaatctaccccgagcaggcgagcccgcccgaatatccgcctgaccaccctgaccggcggcatcgacctatccagcgtcgacatcgacgacatcatcgacgaagccaaccaggccctcgacaacaccgaccagaccaccaaccaggttcgcgtcgacaccgaccaacccggcaccgacacccccttccccatcgacgacatcgacccgctgagctccgaccacccggtcctatccatcatcggccaccccgacatcacaggtgccactggaaccgttgggcgctccccgtggcgctgccaacagttggccctctacatcgctgagcatccgggagcatcgggggcgactatcgccgatgatttggggctatcagcgtcgacggtgcgctcgattgctacacacctgcgacactggttgggagccgacgatgccggggtggcttacatgccggcggcgacgcgcggctaccggctcgatgagcggatcgtcacagatgtggacctgatcgacgctgctgtggccggggcaggcattaacaccgctgagacggccacactggtggccattttgaagctgggccgcggacgggtcttcgctggggttcctgactcggaacttcgccagttcagggcgtcgatgtaccacgtggaggcccgcatcgtcgatgctgccctccaagtgacagaccgggccctggaagccggagacttggggctggcccggtgggcgctgacccaagggctactggtgtctcccgatcatgaggacctggtcgccggttgtctgcgcaccgaataccaggccggcaacatggacaaggtcgccgagctagttgatcacctgtcggctaccgcacgccgactgggcgtcgacctcaacgaggacaccacccggatcatcgatacggtcacccacgccgacaggagagcatcatgatctcccctgcactcatctccgtcaggaaggtccctatgcaccattatcgtcttggtatcggcactgccctcatcgccgtagcagccctcaccggctgccactcagcaggatcaacgtcggctcccacgccgacaccgagtacccccaccacaacatcgacagcatcggcgagccgcacttctagcccgaagccatcggcgggggccgtcagtgccgccgaagccgaaaaggtctaccgcaccatccacaaaaatgacttcgagttggagaagatgggaggcctagcccccaaccagccggccccactcatgatcaccaactacgcctccggccaggccctcaagagttacacgacgttcaaccacaaggtctacgacctaggcatccactggaagtcagggacctcaaccatcacggccgtacgcgagaagaccggcgatacgactcatcccgaagcggctatcgccctggaatcatgcgaggaccacagctccgtccgaaccgtggaccgcaatggaaaagccagccatggagtcatcatccatctcgatagttggtatgcccgcgacaaggcaggcaccgtcaagatgatcgcacgtaacggagtggaggttccctcatgcgacgtcaagtaatcaccgccggccttctgggcctggctatgaccaccacggcactccccgccctcgccgatagaggcggtatggatggaaaagtggacactgagggtcccgggtacgacgtttcggtagacgtgtggaatcattcccaccgcggcagcacaccccaccacggggactcgggtcatcgggataaaaagcctcaccgcgatgaccatgaagccacagccattgacggaatgtctgagtctgatgcctgggctgttgaccatgggtatggctcagcagacagctatgcgtgccgaatgatgaagtcatacctggacggggcaggatcggcagctctgtccccggcagagcgtaagagccagaccgatgacttcacgaaaaaatgcaaggcagacccgtcgggtaaagctgccccgcctgacccggcccaggtgggccggcacgcggccatgaagatggtcctgcctggggcccgaccagtcattgcccctgacccgagtctgaaccggtggcattcggcggcggtgggccaggccttgtggttgtccgtgaatgacccgactgctaccaagcgtgaatcgttgacgttcatgggtcaggctgtgtctctgacggctcgacgtaacgggctgtcgttcgagatgggtgatggtcacactgtgcattgtgatgccacaaccccgtggtcgccgtctgtggagccaggatccccgtccccgacatgcgggtacacctaccagcaggcagccccggaaggcggttatcaggtcaccgcaatcacgtcgtgggatgtgacctggtcggtactaggacacacgggcacggtccatatcgagaaggccggtgggcagatgcttccggtcggcgagttggagtctgttgttacacggcgatgactcctgatagtccgacgctgtatgaggtgttgggggtgtgccctgatgccactgatgaccagatcaagacggcgtggcgtcgtgccgcgaaagcgacccaccccgatgccggcggcgacccccaggcgttcacggccgcccagcacgcctgggaagtgttgtctgacccggactcccgcgcctcctatgatgccgccctagcgggggaggatgatcccgacgtagaggccccagacaacaccgtcgaccccttgaccccctcgtggtcgtggagtgtctccttcatcgatgccaccccgcggctacgccacacccggcccggcacgctcgccgcgatcgtggtagccgccgccggggtcgaggccgggatcggctggcatgaggcgttggaggccctcgccccctctcccgggttcgtaggttcgtggtggatgacctcggttccgctcgtggccggagtgacatggctcgcggcgatcacggggatccaggccatcatggccgggatcggctggctggggtggggctttatcggtgccgcctgcctgtggggacacccgtgggctgtggccgtattgggagccggatgggtggcctgggtagccgccgcagtgtggtggtggcgccgacggatggcctggcctgcccgcacctgccgggcaggaaacatggtcgacatgcccgaggttgacccgccatggatggagccggtggaactggtagcagaactcatcccctccgtgcgggccatgtggtctcctgacgggcaaacggtggctgtagtagccggtcggcgggtagcaaccttagggatgccgatgcgagggtggcgtggcatcgatatgcggggctggaacccgatcggtgccgacaccgcgtggatcgttgaccagataggcggctggctggccgaccaagacaaaccgctcaccatcgacgggcgcatcttgtacgagacctgggacaggctacagacagttcgtcctcacagctgagaaaaattttgggtccgccctgcatatcggggcctcttcataccttcaaaagtgtgaagggaatacagactcttcgactggaattaaaatggtatatggcgtgtccggtccgcacccagctccacgatgcgccatagaggagccataacttcaccaatcgtatacgatatgagtgtaggtgagcatctaccggtggccgacagtcagatacaagcatgggcggatgaagcagaagctgattatgacctcagcatgcttccgccgtctcgacgtggtcgcccaccggtggggaggggcccgggcactgtggtccctgtgcgcttcgacgcggacactctcaaggcgttgtcacaacgagcccctgacgaaggattgaccacgcgttctgacgcgatccgtgctgcggttaaccagtggctcggcctcggctcgtaaacattatcggcgcgacaaccttactgatgacgctgttggttacgccgtagagcacatcttgtactcgtgggcgctcgacgatgccgatgatcctcgttgctggatgatgattcggtgttgacccagctggcctcctcatggagctagttatcctcatctacgacgatggctatgaactcctgatccacgccatgaaagcccgccctcagtatctgagctacttcgctatctagtgttgttgggcgagttgaactcaacttttctccgacgcaagcgccaataaaaggctgatccatccgaataccaccaaacacggctgaagtgtggaacagattcagcaagacagggtgcggtgctcgggtgcgttggggagatgaggatattcaggcttctggcgggatgtggcttgatgacgtccaggatcaccggttcggttttgaaggtgccttgcattaatgtcgacagggtcgtacgactcgaggactggatcgaccagcccgttgcgtctgaagaacttcatccaccccggtggagctccggccgcgtactggtgcaacggatcattagcatgggtagcgtgagtatgccttcgatcgtggtcagtgctgtcatcatccaagattctgacgggcggcttctcactgtccgtaaacgaggcgccgaggcattcatgctgccaggcggcaagccggagcccggcgaggactcgcgtcaggcagtagtccgggaagtgcacgaagagctcggcgtcgcattgtcttccgacgacctgcgtcgggtgggagtgttcaccacgcgagcagcgaatgaggccggccatcaggtggtggcgacgattttcacccacaccccggttgcggtgagtgagccagctgctgagatcgagcagattcgttggctcgattggaatgtcgacgccctgcctgatgacctggccccgctgctggtcgaggcagtcatcccgtggctgcggcgccgtatccggtcggtcgctgtattcacgggtgcgaaggatggaaccgaccctcattatcgtgtcgaagcaaccgccttgggccggggtctcgcacacgccgggatcaccctggtttatggcggcgggaaggtcgggatgatgggtgctgttgctgatgcggccctcgctgctggcggcgctgtgatcggagtgatgccgcagcacttggtggacggggagatcgcccatcctagtctgactcacctcgaggtagtgcggactatgcatgagcgcaagcagcggatgagtgacctagctgacgcgttcgtcgcgctacccggcggcggcggaacccttgacgagctattcgaagcatggacatggcagcagctcggtgtacacagcaaacccgtggccttgtacgactcgaccttctgggcaccgctgaccgcgctactcaaccacatgaccatcgaaggcttcatccgccctgaggaccgcgcctcgctcgtgatcgccgataccatacatcagctgatggccgatcttgagggatggaccccaccaccaccgaagtggcgctcgtgacatagaacaaatgattctgactatggctcattgacatctgcgcagcggctactagctccattgacttcaaatcgggccttggccgaggctcggttcaggtggcccggaatggatccccacaaattgaatgctcatgatcgaggtgatgaacgcccactctattgtcctacgcccggttgtatccagcgagcaattgaaggtgctgcgcctgttggtcgaccaggccgagccactcactattgacgggaaagtcctgttcgagacctgggacgggctgcaggcagcccgtcctcacagctgagaaaaaattttgggggccgttccgcacatcgcggctctctttcacaccttcaagggtatgaaggaagtacagacaccaaaccgagctgagaactgtgcagtacggtgtgttgagccgcatatcacccatcggatgggccataatgatctctatgaggtctccccgcaagccataccagaagatccgtcgcggcccgaagccacgctgcgaagagcccgtcaggtccttgacgtgttatgtgcctcagtctctgatagatccgatcgacgagatggcgtggcagttggagatttcgaagtccgatctcgtggggtggtcggctttgtgcaccctcaatgtggtgcgcagggaccgaggcgaggaccccataccgatcccggagtatctggacaaggccgtgctcactgcgttgtatcccgatgggttgcccttcgacgaggacaccgaggagccgggcgagaatgccgggcaggaggagcttgcgatgactggatgagcccgaacatggttgaaggccgccccgccaggcgaccttcaatcaatggtttcggttgtcagctgcagccacccttgccaggtgctgtggttcttctccagaggaggagggaccgccatgaagacccagaagatctagaagatccaaaagaaccggtttcggctgttgcttcggtcttcatggtagctgatagcccgcgtcgttggaagtgcgacgacgccgatcctcatcggtatcgcaccctgttccagggtcgagaatgtgaaggattaacaaccatgacaagtcatgagacgccctccctgagggcgtcatgaccgctttaattcaagctctgccgacagctgaactgtctgctggacctggtgctagcagtccagctagaccctctgctgagggcttcatcaagattcatcacgaccttattagtgcgggcgtgtcgggtaacgcgatggcgttgttcgtcgcgttacgtaaccagcccggctgtgatcagtggacccgtcactcgtacctgcggctagcccaatggtgcggctgggatgggctgtcggaggcggcgggctgtaagcgggtgcagcgggccgctgctgagctcgctagcggtggttggctggaatcgcgggtcggccatgatcgtcgcaccgctaagacgctggtgtggcatcggttgaccagccccgacaccgaccgctgggagcaattgccgcggattgtgtgggcgaggatctgccagatcgccggggagacgtcgggagagtgggtgaggcattggctggtgtggcggatgctggccggtcgtactggtgtggctcaggcccctacgtccatcgtggctcggttcctgggctgttcttcgcgccaggtctctcatatccgtggggctctcgttgatgccggtctgctcggctgtgacgaggtctcgggggcggcgagccgggtgtggttcccctcgatggccgaggagtgtgcagcggatcgtgaggtggtcgatggggccgtcgtcgatgctgaggtgggctctggtgaaggtgtcgaggagggcggggaacccctgtcgattttgtccacccacccctgtcgattttgtccacccacccctgtcgattttgtccgccaagtattagacaaaccattagacagtgaattagaccctgggtcgcgtcagcgtgttagctcaccgccgcgcgcgcgcgcggcggccgagccgccgaagccaaagaaacccacaccaccaacgcctgaaccagcagcccccgcttcagacagtcctgtgtcagcgcacgctgatgaggctgccaagttggcgtggcagttcgtggggtggtgtcctcagctggtaggggcaccgaagaaggtacgtggccagctccgtcagctggtcgctgccgagatccgccggaatccgggctggctggatgcgccagcgttggaggttgttgcccagcgggtacgtgctgaaggtgcgctgggggtccagcactgcgagattgtgcgagccgagctgcacggggtgatcgccgaccagaaggccgcccccgcccgccccgacgccctgcacgcgcgggagcccaagtggtgggacgacgtgtactacgaaggaaacacaaccgtgtggacgtacgactctgacgaaaccagtgacgacgacgaggcgtggaaccggtcgcaggtatgtcatgttgctgagcgtgacgacatggctggcgggattgctaccaacctgctggcctcccacgctgatgatccgatggcctggctgactcgccgtcaaaccatgctgatggctcgtttcccccacgcccagaacgaggtcaccgcgatgtgccaaatcgtgcgcaccgccctggaggccgacctggccgccggaacccggtgggaggaccgatgagggcgctacgtcgaaagatcatggtcgtggtggctgtgttcaccgtcgcggtagcggggctggcgttggccaggtcgttgccgtttgccgacaggtctcagccgccgacgaccagaaatgccacccaggcggccgcaaccggtgcgggggctgcggcgggcgcgctcaaccgtctgccagtcaaaggcaaagcagcgatgaccggatacacccggacccaattcgggcaggcgtggaccgatgacaccgaccgggagttgacccgcccctggggtcacaacggatgcgacacccgcgacgatgcccttgcccgcgacctggtcgaggcccacctgaaacccggatcacgatgcgtggtcgtctccgggcgcctccacgacccctacaccgggtccacactcgcctggcggcgcggccggcacacctcgacaacagtccaaatcgaccacgtcgtagccctcgggaacgcctgggtcaccggggcccaacacctcccggcaccgacgcggcgcgctcttgcgaacgacccactgaacctggtggccgtcgacgggcctgccaacgaagctaaacgcgacggggacgcagccacctggctaccgcctaacaaggcctaccggtgcgactacgtggcccgccagatcgcagtcaaaacgaaataccagctatgggtcacccccgcagaaaaaaccgctatggcgcgggtactagaccgctgtccagcccagacacttcctaccggagccccacgatgaccacccattggatccccgaacaactcctagaacccggagtcggagtcatcctcgacaccgaaaccaccgacctggacgggcgcatcatcgaaatatcgatcattgacgcagccaccgggacggtcctgatggaccaactcatcaacccttccagcccagcaccacccactacaccgacacgatccacgaagctgaaaccgaacctcccatccccgtccgaaacatcaacgaactcatcaaccccaccaaccatgcatgaacgcacgatcgcctaccggccagccttcctgcgcgacgtgaagcggctcaaaaacaagcactacaacatgaacacacactcaaatgggcggtaaggtcacgaagtcgacgtggctgcctcacggatggcttcggcgagctcttggggtcgactccacatgggccagtggccggttggcagatccatcgcggtgaagttggtcaggtgcgcgacggcgctgaacatcggattgcctgctgcggccagctcgaggacctggacgctgggaatggagcagcagatcaacgtggttagtacatcatggcgagcgctattggacagcgcgacccgtgcccgggccacttgcgcgggttcaggaaccgcccgtgcccggaaccggtcaaggtgctcgttgctgaggccctctaaactggcctgcttgccgagagtatcgaagtcaggaagtggcagctcagctgtttcctcaggtagatctggtgcgaaggcacctccatcgctcatgggaccggagtccacccagacgatccgatggaccaactctgggtgcctgtctacaactaggctcaccggcccgttcgcgccactgtgtcccaccaggaccgcatcgccgcccatctcgtccaggatggctgagatggcgtcagcttggtcgtcgagcgtgcgcgtagtgcgctgggtgtcctccggatcgagacctggcagcgtcagccccacggctcgactgccagcagtgttcaataactcgactacctcgtcccaagcccaggctccgagccagtaaccaggaacgaggacgataggccgatgctggtcaggtcgcgatgttgaagtcatggagacatagttgcacagtgcgcggacaagggagtggcactatttctggcatgaatttagatctgggtgtccggtgaggcgatcagaacgcctccatgtactgtccgagtgtctaggatgcagcggacacagtcgagcagctggctcacaagtttccaggtgtccttctgcccctatgagggaagtcggctgctctcgcaacctttgagggctgctctggggtcggaaccagttacagatcgttcaagttccgggaactaccgccggtcacgctgattgattcccgggcgatctcgcttctgacgacagtggtcggtgaccgagaggagtcctactctgaccccgctgctgcggtgagtaaatcacgggcgtcccggatccggccacccgtccaagtgccagccagcttgatcggctaggcatcgtcaaggagcgacgatgaggtgatgatgcgatgtgagcgcaccgcgaagtgaggtataaagaagccttcccgggcgcatgcgtcgcccaggaaggccaggttggcccctggacggctgaatggttgggcggatcagactgtagcggagacgtgcagtacctcgtaggcgatggcgttggttgggctctggtctgcatcgtggctactgagttcgacgaggatgacggtccaggtggtgatgtcgacggcggtgacgcgggcgatggtggaatcagtggatgctgcaaggaagtcggcggttatgtcttcgatgcagtgggacggagcagtgctggtgggcaggggcacggtcttgacggtcaggcttcgggcagcagagtaatcggcggttccgttaacaagctggtggacggtccagtcctggatcgggtgccggccgaagtcgcgtacgatagccgagtaaccaagttcgccccagcagaactggcgcatcccctctatgtcgcgccagacgtagaagggcgcgtaggagttctggggtgcgcctttgaccttttcttggatgaggtaggccttgaactccagtccatggtagccgtccatgaggtgtccagtctggatgacgcggtcgcggatgatctgcatgtcatagtcggtgggcagggtgatctgatattgcatggcgtacatcagcggttctccttggtttcgtgggagtaggtcgtgggggtgacgggttcctgccaatcgatggttgacaagtcgtcggcggcttgttggtaggtaaggtggatcattggctgtttgagtgcagcgccatgccagtgtctctggccggcgtcgatccagatggattcgcccttggtcaggtgctggggtgcttgtccttcaatatggaccagggcaacgccgcccgtgacgtagaggccctgtcccttggggtgtgtgtgcctcagcggcaaacgtgacggcgtgggcggcacgcccggcgtcttccgtggcacgatcggccggatccatggcggcgcgcagctgctgttctgcagccaggcgtccaggtcacggcgggcagcatcgacacccagggcagcctcgacggcttcagggctacgacgctggccgggctggttgaccgcagaccactggtgccgggcgtcgtccagatcatggccggcggcgtcgatgagggcggtggtggcttcggcgcagcatcgcctgatccactccgaacgtgacaggccagctgtctcggcggcactgtcaatgcgcgccaggagagatttcatgggcgctcatctgtagcctccagataggcgttgatgtagcgcagagcctgatccgtcatgtcgatggcggctgcctcggcagacgacacaacgggctgtggatgataagaccacccaacatagacggcgaacatcaatttctcgacagctttcatgaggcccccggcggcaaccgcatccgcctcatcatccgaggagaaccacttcaggtctgaacggctgtacatagcccctaggtcctgatgtgggtcgaggtccttggaatgatggaagttcctacacacccatcgccaaagacctcaacatggacaacgctaccttcaccactccctcatctgtgaagagccagtttatgcacggtgttgaaagaggcgtcggtctacgacgaatgcgggttaatggtcttgtggtgtggggcgctgggcgatggcatcgagaacgcgtgagtgggtggcgatccattcggccgcgtcggggttgatgttgcgggcgacggtgtcgatcgctgttacgtagtgggcaagcctgcgaatctcagcttgttggtcagggtgagcgctgatgagaggctcttgatgggaggcgcggttacggacgtggcggatgagctccacgttttcctcgaagtcgcgtcggctacgccccgggtagtgaggcatacctccgttacgtaagtcagtgagagctttccatacggttgcttccaggcgcggggtgagcagaaagcgccagttgtccagtgacagactcgccacgatctgatcaggggtcgcatcgagcctcgcgcgccgcagtcgcttctcggccctgtcgacgttacgcgggaaaccaccgagccgatagctcggggattcccaccaacgccgtatgccagtatcggcgctcaggcgcacgtcaatgaagtttctcaggagtacctcgacatggctgatgtcttccaagaacgctttcgagatgcgggtgttccacacgtaccacgcatcgactggttcgatccggtagcggctgagcctggcgggtgagaaccactcctgcaacgtctcacgactcaccgtgggagcgtggtaagattgatgacgataggcctcgggaaggtcaatgccgcgaaatatcggtatacccccgaggtcattgtcttgcccaggcccctcctcgcatacttgcggggcgtcattggctgccgtcatctcgtctcttcccggtacgtggctgtccatgttcacgggcaggtacggcaatgaggttcccgcacacaaacctctaccaagcatacgctggcaagccgttgcatgagacgacgcctccgcccgccacaccaacggtcaccgccacggccacggtgaccgtgaccgtggcaccgaaacccaagccaaagcccaaggccaagccaaaggtaaaacccaaaccgaagcccaaggcccattcatgatcgcagtgcccgatacaaggtggagcggcccacaccaagctgggccgccaccttcgttttcgggacaccctcggcaacgaggcggcgagcgcgggcaagctggccctcgctcaatgccggtttccggcctcgatagcggccctgcttcttcgccaccgcgatcccctcggcctgtcgttcatggatcaacgcccgctcgaactcggccaaggcacccagcagatgcaacatgagctggctcaccggatcagcggaccccggcccatagacctgacccccaaggagccccgatctgcgccgaggcccgcaccgtccaccacatcagccccgacgatctcgcgacagcccccacgttcacccaggtgcggccccggctggaggatgtggtggccgatcgggtggtcatggcctggaacgcctcgttcgaccgggagcgaatcgaagcggaatatgccctagcgggcctggatgctccggcgtggccgtggtgctgcctgatgcgtttagaggcgtccgtgatggggtgccagtggcgtcgactagacggaccccaccggggccttggtgatgtgatcgccgcccgccgccggcttatagcgttacaagagatgcgggtcgccaggatgacgagtgaggggcaataaccaccaccccgaaaggacatagatcatgagtgagattcatttgacgggtgttcgcagcggttagagggcagtggcttcgtcgatggtggtgcgggggagttggtagaagcgggcgagggcgtcggcgtcgaggtgggggtccatggtggaggcggcgatgatggtcccgtagagggtccacgtggtttcgttgtcggtggggttgtcggcccagtgttggcggagttcggagaaggggtggtggttgaggaggaggcaggctcccatggagtagtcctcgatttcgtcggcggtgaggcggttgatgtggttgatgtcggcgaggacggcatcgaaggtgtcggcttcggtttcggttggtgcgtccatgtcaatgttcatgggggaagccctagggcgctggtgggtgttgtgggggcttgacacggatgtggtgggtatcgtgggggtgcaacttctgtgggagttgttggctttactgagagatcccccggctgtggtggctgggggatcgttgtatgtgggctggggtttcccctcgcaacacgccgatacgcatatatacagatacatcgatgtacatgtgtaatgatgtatttatgcgtagtatttctattgttaacaccaagggtggggttgggaagacgaccacggcggtctacctagcaacggccttagccgctcagtaccgagtcatcttgcttgacgccgacccgcaaggatcggcgacgtcatgggctaccgacgctttcgaagccggtgaccagttggacttcgaggtccgcccggctaatgcccccattgtcaggcgctgccgtgacatcgacgccgacctcgtcatcatcgacactccccctggtgactctcagacgattaccgcagctctcgacgtcgccgatgtggtcatcatcccgaccgagtcgggggacctggacatggatcgagcgctaatgacctaccaggtggcccacggcacgcgccgggccttgctcttcaacaaagccgattggaccaggcaataccgtgatgcccacgacggagccgccgccgtagagggtctagacgttctcgatgcgcaagttcatcggcgggtcgcctatcggcaagccatcgggacccgaccagacgacctcggagagttcgcccaggttgctgcccagatcaaggagatgctgaagtgagtaagaaccgcaaacccaccgccgcagacaaggccagccgctacagcggccagatggcggccagccagggggccagtgttgccgaaaccttccagtcagccaagaccccgattaccccgttcaacgtcaaactgcctaccgctacccatacggcgttaaaaatgaaggccgttgccgaccacaccaccatgaacgaccttttgcgcaaggccctggaacacacctacggcttcccttacgacccctaccagtgaaggacgagacaccacgccatgacctgggagcggctttagctggtggtggtgggctgggattgtaagggtgttgcggggttcgtgttggtggtgggtgttacaggtgtctagcagggtaggttggtgtacatgatgataggtgtatgagtatctatgtatctttctatcggggcttatcggtagatgtcgcggcggtgaccgatggacagggcaaggatgatgaggcggtcatcgttgagtgtgcatatgaggcgataatcaccgatccggtagcgccacagtccagaaagatcaccggtgaggggcttgccgtggcggcggggatcgtcggtgttgtcgatgtttttcgtgatccagccgtgaatgagtttttgggtgtagcggtctagctttttgaattctttatcgaaccggctagtggtttcgatctgccaagtcataggtcacactcgtcccatagctcgctgatgggacgagactggtagttgtcgttggcgtagtcggtgagtgcctcacgggctacttgcagatcgaactcgtcggcgatgcggtcgaagagggcttgcttgaaagcctcactcagggactgcgagtgtaggtgggcgtaggaatcagctaagcggcgctcatggtcggttaaacggatggaaaaactcatgatgtcacctcgtaagacgtctatagtacaatgtactacacgagggtgggggagtccactcctcgaccccgcgtagtacgtatcaggggtatggagattcaggcggcgggaacggttcccctgtcggggggtgaggggcgaccggggtgagccggtcgccccgtggggctcactgtgcggtgagctgcaacgcctcggcaatcgcgtgggaggtcttcgcgacgtgctcggcggcagcttcaatcgcggcgccgtctgcttccttcgcccagccggcaacgtacccggctgaaatgggtgcagagtccaacttcccctcaagggcaggcccgtcatgctgtcagcagatctgccagttgtgggtgctggtgtcgtagcagacgccggtgtcggtgtcgtcggtgcggttggtggcccagccggtggtggagtcgtcgagggtgatgtggtggaggtcgggttgagtgttgagccagtgagtcccctcagcttggggtaggccatcgaggatggctagcaggtgggagatggtggctgtgcgggtgagcgtgaggatggttttggatgtgttggtggtgtcgatggtgaagccgtagtcggcgagtgcagcggtcacatcggtgggctggtcggtgtagatgcggttggtgagtacggagcagtcggggccttcgccgtagatgctgatctccacgctggtgccgtggtagtgggcttcgtaggtttcgtcgatcatccatgttgtggcccagtcggcgtcgacgagggtgtagggggttcgggtagtgggaagtccgatgtagggcttggtcaccatgttgacgtgtgcggtgtacttcatcgtcgttgattcctttcccgatctctcgttctgcttataaatatatagcccgatagacagactgtcaagagtactggataaataatctaatacgcttgacttgaaggatagttgagagaataactcacatgtgagatgccatcagcggcgcagaatgccccctcctggccccttgccgccccttcgggtggccaaggctgtaaaccgcagcgatacaggcttacaggtgccccgaaggggcgcctatccacgcgctcacccgacgccgaaggcgtcggcaggccctgcccgaagggcagcggctgcccccc

SEQ ID NO: 188 - DNA, 53136 bp, Propionibacterium acnes
  source 1..53136: mol_type = genomic DNA
ggtgagcgcgtggataggcgccccttcggggcacctgtaagcctgtattgctgcggtttacagccttggccacccaaaggggcggcaaggggccaggagggggcattctgcgccgctgatggcatctcacatgtgagttattctctcaactatcctttaagtcaagcgtattagattatttatccagtactcttgacagtctgtctatcgggctatatatttataagcagaacgagagaccgggaaaggaatcaacgatgaagtacaccgcacacgtcaacatggtgaccaagccctacatcggacttcccactacccgaaccccctacaccctcgtcgacgccgactgggccacaacatggatgatcgacgaaacctacgaagcccactaccacggcaccagcgtggagatcagcatctacggcgaaggccccaactgctccgtactcaccaaccgcatctacaccgaccagcccaccgatgtgaccgctgcactcgccaactacggcttcaccatcgacaccaccaacacatccaaaaccatcctcacgctcacccgcacagccaccatctcccacctgctagccatcctcgatggcctaccccaagctgaggggactcactggctcaacactcaacccgacctccaccacatcaccctcgacgactccaccaccggctgggccaccaaccgcaccgacgacaccgacaccggcgtctgctacgacaccagcacccacaactggcagatctgctgacagcatgacgggcctgcccttgaagggttggactctgcacccatttcagccgggtacgttgccggctgggcgaaggaagcagacggcgccgcgattgaagctgccgccgagcacgtcgcgaagacctcccacgcgattgccgaggcgttgcagctcaccgcacagtgagccccacggggcgaccggctcaccccggtcgcccctcaccccccgacaggggaaccgttcccgccgcctgaatctccatacccctgatacgtactacgcggggtcgaggagtggactcccccgccctgagcagtacactgtactacacagtcattgaggatagaggtgacgtcatgagtttttcgatccgtttaaccgaccatgagcgccgcttagcggactcctacgcccgcctacactcacaatccctgagcgaggctttcaagcaagccctcttcgaccgcatcgccgacgagttcgaccttcagatagcacacgacgcactcaccgactacgccaacgacaactaccagtctcgtcccatcagcgagctatgggacgagtgtgacctatgagctggcagatcgaaaccactagccggttcgataaagaattcaaaaagctagaccgctacactcaaaaactcattcacggctggatcacgaaaaacatcgacaacaccgacgatccccgccgccacggcaagcccctcaccggtgatctttccggactgtggcgctaccgcatcggcgactaccgcctcatatgcacactcaacgataaccgcctcatcatcctcgccctgtccatcggtcaccgccgcgacatctaccgataagcccacaccacccccaaccaccaccaacccggtgcataaatacacatacagctatacacctatcatcatgtgcaccaacctaccctgctagacacctgtaacacccaccaccaccagctaaaaccgctcccaggtcatggcgtggtgtctcgtccttcactggtaggggtcgtaggggaagccgtaagtgtgttccagggccttgcgcaaaaggtcgttcatagttgtgtgttcggcgacggccctcatcttcagcgccgtgtgggtagcggtaggtagcttgacgttgaacgcggtgaggggggtcttggccgactggaaagtttcggcaacactggccccctggcttgccgccatccgaccggtgtaacggctggccttgtctgcggcggtgggtttgcggttcttactcacttcagcatctcctggatctgggcagcaacctgggcgaactctcctagatctgttggccgggtcccgatggcttgccgataggcgacccgccgatgaacttccgcgtcgagaatgtcaaggccctctacggcggcggccccgtcgtgggcgtcacggtattgcctggtccaatcggctttgttgaagagcaaggcccggcgcgtgccgtgggccacctggtaggtcatcaaggcccgatccatgtccaggtcccccgactcggtcgggataatgaccacatcggcgacgtcgagggctgcggtaaccgtctgagagtcaccggggggagtgtcgatgatgacgaggtcggcgtcgatgtcacggcagcgcctgacaatgggggcattagccgggcggacctcgaagtccaactggtcaccggcttcgaaagcgtcggtagcccatgacgtcgccgatccttgcgggtcggcatccaacaagacgacccgatcctggcaagacagggccgtggccaggtagaccgccgtggtcgttttcccgaccccgcccttagtgttgacgatagaaataatacgcaccataaatacatcattacacatgtgcatctatgcatcagtacacatatgtaccggcgtgtcgcggcaggaaaaccacccacatacaacgatcccccagccaccaccaactccgagatcttatgaagagacaactcccacaggagctacacccctcacaggagcccaccagatccgtgtcaagcccccacaccccctaccagcgccctaggcttcccccatgaacattgacatggacgcaccaaccgaaaccgaagccgacaccttcgatgccgtcctcgccgacattaaccacatcaaccgcctcaccgccgacgaaatcgagtgctactccatgggagcctgtctcctcctcctcaaccaccaccccttctccgaactccgccaacactgggccgacaaccccaccgacaacgaaaccacgtggaccctctacggggccatcatcgccgcctccaccctggacccccacctcagcatcgacgccctggcccgcctctaccagcttcccctcgacctcgtgacccaagccctcaccgtctaagcgccgataagcgggggagaggtagcgcactatcggctaaggaaccccacaaacaccaaacccttgtcactgggaagggtttggtgttatgctggtctcacaactcaacagaggaggtgagacatgggaaatgagtaccagaagtcgctcaaagtcctgttcaagaaactggaatctgagcaaggagcccgcatcgagacccggcgcaaaggatggatgatctacccgccggatacgtcacgaccagcggtcatgatccacaagactccatcagatcgcagagcatgggccaacatgctttccgaactgagacgctcaggattcaccgtctaactcagtgaagggggctggagctccagccccctttcaaccacctcccccggacaccacacaagaaaaggagaacatgatgtggcacgttcggttgtcgcttcgcgcaatcagcgaggacatgctgttcgacgccctggacaccctcgaccccttatccccggtggccacactgggccccgatgagcacaccggatcattggcggtgttcgtcgaggctgactcactgacagacgccatcgagactgcccgcacagccatcaccaacgcatgcaacaccgccaccataaccggcgtagaagcccgccccgaagacgaatgcttcgcagacgttgaccggcccctgttcccgccagtggtcggatacaccgaaatcgctgaaaccgcaggactctcacgtcagcgcatccgccagctcgcaggcaccgccgggttcccggcccctgtcatcgaaaccgcccaggggccgctgttccccaaagccgcagccgagcagtggacacgaacacgccagcccaaagcaggccgcccaaaactccagaccaccacctcataacacatcccgtgtgctgaacctgttggccggcccagcacacacccccaggggccgggcccagcccggccccgccccacacccagccgctccctgttgccgccgtggcgaaacgatcaggcgagccacgaccatcaccaagctgaacggagagcgagcatgagcaccacccctgccgggttcgatgtcgacgctctggccgagtgggctgagagtgacgaggcaacccagaccccgcaaaccagcccggtgttccacggcaaggacgccgcgcgcgccagccgcgcattcctcggccgaggacggccggcactcggctcagaccgcgctaccggccaggggcggtcacctcgccgtcaggtccgcctcgacgcacgcaccaacgcccgactcgacgcctacgcagcccagaccgtcaccagcgcctcccaggtcatccgcgacgccctcgacacctatctgcctgcctgatccaaccccaatccactcgggcgcctgtcagtgctggtgttctaggcggtggctggcatcgacggcatctgctgcaacgctataagcctctgcctggctgctatcacgtcgccgaggccccggtgtggcccgtctagtcgccgccatcggcagcccatcatggccgcttctaaacgcatcaggcagcaccacggccacgccggagcatccagccctgcgaggccatactcggcttcgatacgtccctgatcaaagggggcgttccaggccatgacgacccgatcggccaccacatcctccagccggggccacaccggtgtcctggcctccagtgtcgcgacactgtcgatttcggtacgtgcaatgcggcggcggtttgacggatcgacatcccagactcccgcgcgtcccagatcgccatgtggagagtatttgcctccagtgcggccgccacacttgcacgctctcgcgcacgctcgaatgcccgcctagtgctctcaaatgtcgtcacgacgcctccccctgaaaatactcagggtgtcccacggtgggacaccctgagtatttcataccccaactcgcctcaccacacgtcgacctcgacaccgatcaagcgacccgtatcagcgacattgccgtaccgctgccccgcctggtcctccagccacgacaacgcatcccgaaacagcccgacgtcttccaaagctaaaccacagtcgtagccgcccttgtcccccaaccgcacaatctggcgctcccggtggcctccctcgtcgacctcgatccacagtttcgcgtgcatccgctggcctcggccctctgacaggatctcggtgagcaggtcggacgcctgccctcgcgcatcctcgttactgcgggggaattggagtatgtgggaggaacgatgatgggggaggttggtgacctcatggcgcagcaggttgcgcttgtgcatctgctggtcgagacggtcgggctgacctgttgacggggttgagccgtggcgccgcttcctcggcggggtctcgatccgttgctcttccggcggttcggcgtcaggttgtggtgcgcgatctcccctaggacgggggggctcgccacctatatccgagggacgatgagacggccttccacgcttgctgcgcactttcgcagcccgccccttgcggtcacgtcgacgcggcggcggagtgacgtcctcaccgcgcgctagctgcgtcaacgccgccaccaggttggtgcccggtttcagccctttcagcacgtagcgcagcaggcgggggtctcgcttgattcgtcgagcgatctcattctggctccacccctcggccaccagggtgcgcagcagatcctgggcccggctgtcacgctcagccacggctcaccccctcagggatgcctgcctgctcggcctgctctgacagggctgctcgttccgatccggtctgcggcgcttccagagggccaggcaagacacccttgacacgcagccgaccatccttgccatcgtcgccgcccccctgggccacagagagcgcccaggtaggcacgctgctggtgtagatggcgtcgccgtgaatggccagcagacagcgagttctcaacgctcctcccctggttgtggcgtttttcccggtggcggggtcagcgatgggtgtgttgagggtgcgcacgcgcgacagagcccagatacgggcagcgatctcaggatgccaggtgtcaggatcaggacggcgacgggcagtctcgtactggtaggcgatgacgtcaccatggttgttgcggatgacctcgaaaccttcgatgtcggagggaatgtcctcagcgtcgtagacaacagtcgtggtgacggggttggaggccgacatttgcccgatggtcacgcgcagcatgttcttcaaagcggaggtgagaagcgcggtagcagtggggctcttgtctgcccaacgactctcagccatcccgatcatgtcttggatggttttgacccatcctcgaatggggtcgaccttggtcagtttgatccctgccaggaactcgatgggccgactaatgggcccgtcaggcccgaactcggtatcccacccttcgtcgatcgcaagcttcaactcggcggcatcgacccacgtctcgtacgtggcaccaggcacattgggccaaaaccatcccgctcgaccctgggtacgtttgaccggaaacaaaccgatgccatcccaccaggacggcacggtgaaacggacgtggtaacgggccggatgccaaggatcgtcagtaaacaggtcgcgggcttcggtggcgccgagcagagtcgctggtgcggcaccgatctctccggtcactgatccggcatacatgaatcggccgtcgatgtacacgaaattagggatagaaccggcgggagcagtaggccgccagccctcttcccggtcaccagagtcaccggtatcaacacacagctcgtaacggtgctgaggcgatgtgcgctggatgagtacacccaattcagggtccatcggctccatgccataagactcaggagtccgcagcttccaaaggttaatgccctcagccccagggcgatccatgagagcccaatcgcggtcaatcctggtagcgataatgtcagtcagctcccgccatgcccagcgagcctgaaccggagtgagaacctggccaggaaaccactcatcagccacaaggacatccacgttgcggtcggtctccttatgagtaaaccggcctcgcgcaggccgacccgccagcatgaacaagccccgcacgtgccaatccttgatgaactcgcgagtgtgggcaggagtatcaggcagtagccacgactgaggctgatcagggatatcaccacagacgatcagacgtcgagcgtgatggtgcagcgcagtcgtcaacaaatccgacagagtggcgcgcttagtgcgccgaccccccagcaccggcaaaatctcgttcccggccgcgtcaaccccccgagcagtgtcaatatccagccacaccgtcacaggatcaggaggccgatgaggggcaggccgacgccgctcctgaccatcactcacgacttcctcctctgagccagagaacggccagcatcaagggcattgacacgctcgcgccgctcctcacgcaactgatagacccgaccacgggacacccccgcaacctcagcaatcgtggcggccgataaatgcccaatggatgcagcatcgacaagaacctcacgccacgccaaatcaatcgctcccagctgagctagagcttcctcacggcggcgggtggcgtcggccaccacgcaggcccaccctgcagggtggatagtctccacgacgattcggccatgacggatgggtccccatgcatcagcgggtacctgccagccatgatcagccgcggactcggtgattttgagtcgtcgctcaggtgcgcgggtgcggacagtagcgtcggtggtccaggtttggactggcacccacgccccttctcgggcgcgttcgatgacgcacgtggcgccatcgtcggtaaccgtgatgaccagacggtagtccttcccgtctggagtggttcgatagctgggcatgtagccctccccccatatgtcaatctaactagacatattctctagcctatttgacacattgtcaaggacaatagacctttcgtgtgaatccaccccgtcaaatgcacactcacgcctcatggcccgccgtgacgccttaacgaacccgaaccgctcataaaaccgctccgcagcatccccagaggatttgagttccaaggtgaaaccttgctcgtcagcccattggcagacgtgggcgagaacctgtgatccgtagccctgatttcggggggcggcatgcacgcacatcagcatgtgaccatgacggcgggtcggcgggctgacataagccccaccacgccagtccggtgtgatctgccaacttcgccatgccgcagcgcgccagcggcgggcctcggtagccaccatgatcaccatgatgatggacagggctacgacgccgactatggtcagctcactccagccaggccagttcccggagatgatccagcctcccagcgcccagatgatcatggcttccacgcccgccgcaatcgggacgagtggggcagtacggatgcggcctgccatgatttcggtgatctcgctgcgatgccacgaccaagagaactcccacgaggcacgaattaggctcatgcgtgaacggcttcctcggcttcgctttgccatagcttctctagacggcgctcggctagctcgtcggggcacggcgacagcctgccgcactcggagcagaccccgaagtggcgcgagagagtgatgaccggctcatcgggggcatgcaccgattcaacgaccgggtgttgctcatcggtgagtcctgaggcgtgaccaatctcggctagacggaggtgaaccataccgtcgtagtagtcgacgccctcaacgtggaacgggtaggagccggccgaggtgtggcctgcaaccagatccccgacttccagctgactggcggtcatggaccgcaccggtggcagcggggtccgggtcgcgttgatcctcatggtcactccttgcttctgcgccttcatctatgaaggtgtcataaccggggtcgatgtgcggagccacagtcactttttcagcagatccatcatctgggacccaccccctcccaaatgtgttaaccgtgatttacactttaaggcatgatcgaacacacaccgacacccgccgcacctcgcgtggccatcatttcccctagcgggccaccacggttctcggccgagcctcccagcgccgcgctgcgacgccatggtcggacccgcatgaggtcccttcccctatcccctcacattcgcgcctgggtctccaccagcggtcgtaaacccaatcccatagccaccgccctgatctggatgcataccggagccctgctgccggtgtgggacaccgccgttttgactgggcctgccctcggcagacgtgtgcgccctctcagcagtgacgccgaactgacctctcggcggtggctcgaccaggttgccgaccatcccggctttctcgacacccttatcgaggccgcccacatcaccgagggatggcatcacgcaacacctccgcacattcaggccccttatcggacccttcatcagtgaacggaggtacaacgacatgaccagtgacattgaatggggccacagccctgatggccgcgccgaagccttgctgtaccgggcttgggccaagatgctcgtgcgcgagtccaggctgccctggcgtatcgtcgccgctctcgccggggtctcccccacctccatgcaccggcttctgttcggccgcaatggccgacccgtggcatggatcggctccgatgatgcccgcgccctgggggccaccaacatcgaagacctcacctcagcggccaccgaccggataccggcccgcgagtcccgcgaattgctggtagccctgcacacccttggctggaccaacgcgcacctgagccgctggctcaccagctccgacctcgccctggccgacactcccaaggctctctacgtcactcgactatccgcagcccgtatccaagccacctacgacatgatcgtcagccagcccgtccgccgcaccggccacgccagcacaccgcctgtctcgtccccgcaccccgctgccttatcccagcccggggtcgccgccaccaccgagatagtccagcccgccctgttcgagctggccgactacgcatgagaggttgcacacatggttgaatcgaaggacccgaccagccaccaggaggcccccttgcgtctatatcgcgctgctctcgccgacatcgacatccaggtcaccgtccgtatctggagcaccgccgatcgtggctgggtctgggcccccctcgacacctggacccctgacccgacgccgaccacaccagcccagttgtccgacgagcttcaccaccacggatgggtcaccgccgaggcccccaccaccctcaccgaggtggatgtcacccccgagaactggcaggacctcgtcgaccacgccctcgctgcccgcaaccaccaagccaaccagctgcgcgtcgccgagaacatcctcaccgacatcctcggcgacgccgccgacgccggcctgtctgtcaccgctctcgcccgcacgaccggactatcccgagtcgccgtctacaaacgcagcgccaaaaccatcgactccatgagacacgccacccaggccggcggaatcctcaccccctcctgtctcacccacgctgagagaacagcgctcggcctgcccgacgagtaacccccatctcggaagcgccacgggcaagaaggcaaagcggcagtgtcttcgaaccggtcacgaacacgcgaccctcgacagcacttaggccaagtttcctaactaagacggaccaatgggaagcatttttcccacagcaccgcacatcggccggggctagggacccttcaccagtgaaggcaccctagaaggaagacacaccatgactgctgtagccctaccggacatcgctgatctggaccgcgccgtcgacgacctcaccgatgctcttatcgctaccaccgatgccgctgagactagtactgacggcagttggtacatcgaaagcaccgtcgaggagttacgcgccgccttggctgaggttgcatcccgtggccgcgcagtaggggtcccagcatcattgctggccggcacatcgcgggcatggcaggccgggcaagtcgaactgatccaaatctcagggcagatcaccgacaacctcatcagctggctggccatccaccccgagaaggcagcatgaccgcaaacacaggaagaaacaacgcaggcgaagaaatcctcgtcttcctcgttgtcggcatcggagggatagccctactgaacaagatggtccccaagatcattggcaatctcggagcatggcttcgcgcccacggattgctcgacgctcccgggcagggcttgtttgatcttggttcgttgggatcagttagtgctgcccacctgatgatcgccgttggtgtgctgatcattgtgggcgcagtgggggcacggttcactggtcgcagggatcagtcgaggatgtaaacgatggggcaaaccgaggtattggtcacagaatcgttgtggcgcggccgcgggtgagatgggggcggcaagcagttgccagttaaggcctgtttagttgacttaagcacactatagtgggtggtatgaatctcaaggagtgggcaggagtgcgcgggatttcgtatcagaccgcgctgcggtggtatcaccgtgggcttatgcctgttcccgtgcatcgagtgggaaggctcgtgcttgttgattgtgacgagcatgggttgccgttcgagggatcgacctttgagccgacgaaaacgatcatttatgctcgggtgtcctcggcggatcagaaatccgatcttgataggcagatcgctcgagtcatgacatgggcgagcgcgaaggaattgtcggttgatggtgttgtcaccgaggttggttccggtctcgatgggcatcggaagaagttcgagaaattgttgaaggatggttctgtcaggacgattcttgtggaacatcgcgatcgattctgccgattcgggtcggaatatattgaagcggcgctctcggcacagaatcgtcgtctccttgtcgttgacgacaaggagatcgaagacgatcttgtgcaggatatgacagatgtgctcacgtccatgtgtgcgagattgtacggaaagagatcggcgaaacatcgcgcccgaaaggccgtggaaactgtcatgatcactgacggtgaagaatccgttaaggatgatcacgcatgatcactgagcccgcggccccgaaactgggcaggaatgatccagatgttgttgtccggtcctacaagtttgcgttgaaacccacgacgtcgcaggaacggaaattgcgtcagcatacgggtgcagcaaggtttgtctacaattatctcatttcccagtggcgcgacgacattcacactcgtatcgaagaaaaagaacgtggtgttcctgaggatggattgacgccgttcacgtttaagttgtctgcctatgatatgcgcaattactggaatcgcaccaagggtgagtgtgctccgtggtggccagaagtgtcgaaggagatcggcaatgatgcggcacgtcgtgcccatgattccattgagaactggcatgactccaggggcgggaagcgcaagggtagaagagtgggcttcccccggttccacaagcgcggatgccatgaatcgtgtacgttctcgaccgggacgatccgtgtcaatcctgatcgtcactcggtggcactgccccgaatcggaaccataaagactcgcgaaaatacgcgcgaattgcaacgtaaaatcgccaaaggtacggcaaggatcactcaggccacgatctctcgcgggttcaattattggcacgtctccttcaccgtgtatgaaaagaaacacattcccgaaacccacgcacattccggctctgttgccggggtggacatgggtgtgggagatcacgtcatcgttgcggcaaccccaaacggtgatgaaatcatgcgtaggggattgccgcaatcggtcaagaaggatgaagcgcgagtgcggcaccttcagcgcaaactgtcgcgtaagcatggcccggataagaggacgaaaaccacgccctcgaatcggtggattcgcgcgaacaaccaggttcgcaagtatcgcaataccatggcgaacgtacgtcgcgatcttgccgcgaaggctgctcatgggttggcgacgaattatgagaccgtcgtcatcgaggacttgaacgttcaagccatgatgacgcgcggaggcgcacacaaacgtggtctgaatcgtgcgatagcgcaggcctcgtttgctgatcttcgacggagaatcacctacaaaacgaggtggaatggcggtagaaccgtcattgccgatcggtggttcccatcatcgaaaacgtgttcggaatgtggagaagtgaaatccaagctctccttgtccgagcgtgaatacatctgccatcgttgtggtgttgtcgtggacagagacctcaatgctgcaacgaatctggcgaaattagcggcaccgaaatccggtgtcgattttcacggaaccgggagttcgccggggatgggacgtggaggctcggggaagaccagctcaccctcgggtgagctggcaccggccggtgaagcgtcaatggcccgaaaggacctgagcggccgcaaggccggcacgagataacctgaccatcagagtcagttctcatgcaacggtcagtgggcgatggctaggccgatgagggcgccgctgcacaggctgggtgcccaggggaggaatcgggtggtgtggtgtcggaaccgatcgattagggcatatagggcgatcagggtgaggccggctatgaccgtggcgtggatcgtgtcgatgccggttgctgcgaccggggctgcccacagtggtgtgatgcgcacgtcggagaagccgaagccgcctcgggagatgagccaggcgatcatccacgctgcgaagatgatggtggtagcgatgacagcacgtgttgccgcagtctggtccgagagggcggtaacggctacagccccgatccatccggcccatccggtccacgctagggctgccggtatccatgtggtgatggcgtcaatgacggcaacccatgccccgatggtggctagcagggcccacgtcggccacgtgggtgctggggcccacattgtggcggcgatcatggtgaccgcagccgcggcacagaccgcgatcaagcttcggagactgtaggtgtcgcggtaggcgattttgtcgggggtggcggtggccggttcgggcaggatgcgagtgagggagggccatcctgcggtcgcaatggtcacgacggcggcgatccacacgatctggtgcatgggtctcatcatggcccaatatcgatgggtgtgggtggccgacatggggtcagtcgtcgagaggtttgcgggcggttgtggcttcttgggtgccgaggatgagggtgccggagtcgtcgccggctgattcccagtcgacgatgacctggtcgccgtcaacgctggattcggcgatggtcacccattgcccgtccatgtcgatgagcatcccggcggccagctctgtggcggcaaccgggtggggtgggctgtagaggaggtcgatgtcgcgggcagggtcgtcgggttcttcggttacctcaggtggggtcgatctggctgtctcggtgtcgtcggccaggtcggctcccaggatgcgttcccattcggggctggttttcttgcccgctgaggccatcgtctcgtcgatctgttcgtcagtgggccacacaaatttctttttggtccaggtcgtggtgtcgggtcgcagctgatccagcagttccaggtcttgcggggagtgggccttgcgggggtcgggggtgtagaagaattggacttccttgggggctgattcgccggataggtaggtgcctcggccgcgtttgccgaacgggatgcccacgccgacgtgttcggagccgaacatcatgcgggctccgtcagcggacaggggtccggtggcggcacgcccggagaagttgtctcggatttcgccacccaggaactcggcgtcggggcgttgggtccccagatcgacgtggatacggcaggcggctgccatgcgcagcagggagccgatccagccgaaaacggggcattctccgggcatcccagagaccttgatcgttgaccaccagtttttcgcgttgccgtagaactggcggtactcgtcgatgaggaccagcacgcgggtgaagtcggtctcgcgggccccttcttcttcgatgcggcggtagcggtcctccatgagagaccacagccagtggatgagggcgacctggtcggggacggtagtggcgaccatctcgatgttgggccactcccgcaggcccaggtactcgatgcgtttagggtcgatgacgaagacgcgccagttgcggcgggcaccctcgacggcgtcgccgatcatggacaccgtttttccggtacgggtgcggccggccttgagctggtgggccatgacaccggagatgtcccagaaacaggtgttgccgtcctcgtcgacggcctgggggattttctcccagtctggggagtctgggcccggaagggccacgggtcggggcaccatcgagggcagggggtggcggcgggtgacggtgatggtgtcgtgttccaggtcgaagtcgctgcgccactggccgagcatcatcgccgaggtcaccgcggccaggcgcaattggatgttcgggctggacaaatgggcgccacgttggtggtgaatggtgaagccgtccaggttcccccgatcggttttccaggaatcgacggtgaccgccgacccatagatctgagtggctacttctttagcccgttccttgtctcggtccagatcggttttgtcagggtcaggggtcggggcgcggtattgcaggacgaaccggccggccgggatcgttgcggatgtcaccgtgaactctgccggcgaccaggcagccgcggccgcctgggtgagggccattggcatggtctcgacggcagcctcctcgggggggatggtgagggtcaggcgtcgcggatgcgtcttcttgcgattccatgtgactttctgcctcaccggcaccttcgccgccgactgaatggctaggcgagctgattcggcagtttcggtacgccggccagcgcgtagcgcccgtcgtgcgtgaaggctgcccaccacagcacagcccatacacggcagccaccagcgcggatcagcggctgctgcatagcccccggtagctagtaccgcacctgaccagccggccgcgatacttttccacgccggtttcgcgccaccaggaccagcgttatggacggtctgcttcgaggctgcggagggacgagacagcggagtgctggtcatgccgcggcctccttgtggcaggtcatttcacaggcatgccggccagcgatgatgccgtggcgcaccgccccggtagccgcatagaccgcgcacaactcaaacacggggcacccatcgcaggccgccgggttcatgctttctttgtcccacgatggtgggtcatcggtgcacggcacggccaggccatcctgttgagcggcgctgatagcggtgaataggcgcagctgggcgcgaacttggtctggggtcaggttgacggtgcgggctacacgcatggggttccttcctcttcaccagtgaaggttccctagacccggccgatgtgcggagggatttcagtgttttatcgaggtgaccagccatccggtctgcgctgcgggttcaggtaccagggtcagatgcagcatggtgtggtcggctaggggcacggcgaccaggggcccgtcggcgctcgccccggtgagggtgggagttccggccacggtggtggcgggaatctggttgggtttcgcggccatcagggagcccatgagggtcggggcggcgatctggacgagggcgactttgcgggcggcgggatcgcgggtcaaccagccgcgggtgaaggtgagcgcagccgacgtgatatcggggctcagcggggctggtgtggcggctgggtgggccgttgaggagggccatacgcgcggtagcgatggcgacatcgagcgggtcggagtggggtcaggtgtggggcttagggtccgatgtggcgatggggctaccgccccggtggtgggagacgagactggttgggggtggtgttgagggcgtgggatcagggtgaaggcagccaaactggccgggatgaggatgacggccgcgccgacacttcggagcgaggtcatgtgacgatccttcggtagctcgacgggttgccgtagatcttttccacgttgatgccactatgtgggttgtcggcgctaaccatttggcctccaccgatgtagacggccacgtggtgggcagggcttccccagaggatgaggtcgccgactttgagctggtcacgggccacagcagtgccgactttctgctggtcggcggcggtgcgagggaggctaatgccgatacgccggtacagcgccgaggtcaggcctgagcagtcgtagccgccatcggctttgccgttgccaccccacacgtaggcgtaggagttgttgtcggcgatcgatttggcccatgccacggcttcggccaggttcttcgacacaccggtctcgttagcggccccggtggcacagttgtttgacaggtgccctgtagtagtggatcccactatttgtttggccatggtttcccatttggcgtaggcatcgggcagggctgagccttgcactgcctgagctgcctgcgtcagcggcatcttctgccagtcagcgatgtcgactaaaccgggaatgtggaatccagggccgccggccgatccggggccagcgtaggtgatggtgtggcctttcaagaacgcctcggtggcgtaggcatcattgttgacctgatccagagtcccgtaccagcccggcaggatgcgctgctgaaaggggccggcgtcaccgtcaccgttagccttcgctgaggtagggtcggccccaagatctgattcttgtttggcggtcatgatagcgatgaccgctgcctgggtaggcagtttgtcacgctggaccacagtgacgatggtggtcacgagctgcttctgcctggccgtgaggcctccggcacccacagtgcctccggtgacggtacccacgcaagcatccccgccgacactgccaccgccgccgccagagttgtcgtcgagggccccagagcctactgacagcagcggcacaatgatcacggtcgctggcaagaccgccaggcccgccagcatcagcactgctgcactcaccacggcgatcacgtgagatgctttcaacgctgcccacctctcgctggtttgagggggcgacgcctgctggtacgcacaggcttggttgatccagtccgccgttgattggcaggcctgggtttgatcggcttgctgggacccggtttgggctccggagtcttaggctccggcttcacatgcctaggcacttcggctgcggtgggaggagtcagcacgtggcgtaccggcttggtgaccttctgggcacccgaaacaaccggcttagacaccaccttggcacctttgaccaccggtgcggctgccttcgcgccggccttcttgactgcacgatgcgctttgatagccccggcctcggcccggccaaccctactagcagtagcatcgagggctctgtgacccgtcgttgccctcaccggtgcatccttgccctgacgggcctgcttcgcgatcatcgacataccgccccgcaacgccgaaacacggttgtgagcgtgggcgacggccgacataccagctgtcgtaattttcgactggccctgcggagctcctcccccggtacggatctgacgatatgacgccgaagcacgccgcgccgccgaggccattcgcgccatcttcgcagcccgggtcactcccaccgacgcgccaccggtgactaccgcagccgcagccgaaaccatccgccttcgacccaatccagtgagcttgcgaccaccgctgcgcaccatccggcgagcaccccgcccagcccactggccaatcgccgacgccccttcagagcgcttactacgcatccagtcgttgatcttggccctcagcccctcctcacccttgtgactacgccacagagacaccaagaatccgatgattcccacgatttccaacatgttgacgaccatgaccttgatgacaacgttgccatcagaggcgaagaccgacttgatgacgagcatgaccacgcccagcatcaccatcgacccaacaatgccgatcatcgagtacaagatcgaacacagatcccggataagcgggtctgtgcgaccaggaatagcccgcagcacgttgagcatcgacatgaacgccgaccacaccaacttgcacacgtagaaccagcacatgcccgcgaacaccagcaggattgctgccaaacccgtcaccgttgacgagtaaaagaagaaccccaccaaccaggaaccgtccgcaatatcgccggcgtaatccgataatccctcgtcacaatcaccgaggtcgtcgcgtgcatccgagatatcgtcgtaaggaccacctttgagcacctcgatgtacttgtcgtgacatttggaatcaataatgcggccgtagttgagttgctgatgaaccggcgccacgaacgagtccacaatgatcgcagacagcttcggagccttcgagtctcccgtcgaggtcatgtcatcaggaacctcaacctcaccagcggtcgccgtcccaggatcaaccgaactggtaatcatatgagacagcgccacaccgaactgctgggtgcgagccagcggagtagccaacgtcgtcgtatcacctgcaaaattcgccaccggggccgccaagaaacccaacgccagcgccgcagcaatcgccgcacgcgcacccgtagcccacgcccctgccgtacgtcccctcatcatcttgacgaccacgcccacaccggcgcacgtcgtcagcaacgtcaacaccgttccaccccagctgtccgctcccagcggggccaaaaccttgtcgtggatatcgttctgcaaccccaccagcggtccggtaatccacccgacccagctcatcgccacggtccagtccaacaaccggcacaacagggcaatgaccatcaggtacgtgttccaacacatgccaataatggaggcccacatactcttcagcggggccgtaacgccaccatcgtccatcgacatctggtactgaaacaagtgaataccgttggagtcagtcacattgaaaccgtcacccatccagcccagcccaggacccgacgccatggcaggcacactgctcagcgccaccaccagaaccagcgtggtgacgatgatacggaaccaccgctccccggttccgggacggcgtggatgacggctcacgctgcctcctggtcgtgctcgggcgggttggagctggcggcttcgcggtggggagcgtaggcaggtctcagtagtcgaatttcaccgacgttgccgtgctgatcggcgtacaggccacaaccgggacctccggggttgagggcaatcttgaccaggtcagcgaactcttcaggggacgttttagggtcaacgcccaggaactcgacacctttctgggcgaggttgatgttgtcgcacagcaacacgatgcgatgctgaatgaggttacggacggtctcgttggggtaatcggcctcggggtcgtgggagccagtaatgagccaggcgttggctcggcgggactcacgcacgtactcgtcgatggcgtgggaggcctccggcgaggacgacatatggtggaactcgtcaacgatgaaagcggcgtcgcgggcccggtcgctaaagcacaccaggcgagccagacgagcaatgagcgcgtagagagcccggccaaacaccttgtgcgggggcagctgacgaaacaaatgttctgacagcatctcctcggcgttaggaagagcgatgccacaagtgccaatgatgaggatgtcggcgctcaggtcggcgggaggaaggtccgggtcaaagatggccgacgctagggaggccgagttctcgatgtcagcgaacacggcaatcctgtcagcgatcgcggtggcctcgggaaggtcgcattcctcggccaggtggcgggccaaacgcccacacgaggtgatctggtggtcacgcatgtaggccggtttgaggaccttggccagcgtggtcccggccacaccgatggtctccaagttaagcaaggtcagcaagaacgactgggcgacctgcccggccatctccggaggaaggatgcgcagcgggtccagcgacagcttggggtgggccgtgtcgacgatctggcgtctaaccccgtcgatagagttgacaaaggttacccactcccgctcatcggagttgtcggtggcaataatgcgcccgccccgggccgcgatggctgcgcacagccgcttctcggccatcgtcttgcccgcgcccatcttgccgatgaacgccaccgtgttgcctttctgatcctgagtgtcggcatgcaaatcgaggtaggccagcgactgcaacggggagcctgtgaccacagccaacgggatgccggtggtacggcccaaccggtactcgaccaccgggatagatgcggcgaacgcggaggcgtgagtcagctgacggtaggcgcgaagcgaggaggagaaccggccaccgggccgggcagcccacagcaagtcctcctgacggcccacgggacgcacccacgtgaagtcaccgaacaccggatcattgacgaacgctcctgccagctcctcggtggtctcaaagtcaggagacgagacagtgacggtgataagagcctggatctcgacctcacgctcatcggcggccagctcggcgttgtagtcgacgagcacctgagcggaatgctcgatagacatgagggtcgaagcctgggtcatctcaccgccctcgacgttgtcgagctggtcgacggtttggcggatggcccgctgatttttctgcatcgcagcgtgacgggtccgggccactccccggatcgccacgtcgaccggcacgccagtgtcgtcgatacggcccaggaactcgtaggcaggccacgtcatcgtgcggggcaccttgcccagcgcaatgtgggactggtagacggtctcgccggtgtcggcaccgattttgaggacgcgacgattccacgcctgagccgtccgggacatgtgggagactcgcttgtcatcctcgctggccagcaggtcggaggtcgcggcctcatcgatgaccaactcccccagcgcggcacgtccaacctcatccatgagggcgattccctcgccaggggcatcatcacgcaaccgggtcgggtggcctgacaggtgctgccgaagccagatctgttcatcaacggtgaccgggcggggttggaacgctgccggcagtttcgcaccgaattccttagcctgacggagggcccactcccgtgcgacacggccaggagcggtggtcatgagtccggcggcttcggtgattttgttgagggcggcggtccaggcggtgtgggtgcgtattttctggtcttggttgagtttgatcgataggaaccacacgcgccggcctagggattcggtttcaggctggtcgagggtggcgtcgatttcgtcggcccacacggggtgttcgctcaggtcgaggccggcggccatggcgtcgacgatttctgcggggtcggtccaggtgagggctccgttgaggcagaactcgtggcgggcgaggtggcggaataggtcgcggtgagctgcggcgacggtgagggaggcgttctcggtgacgggtcgctggaggggagtgagtcgccaagtggcccagatgtcgccggtggaggtccagacgaggttgtcgaagaggaaccgttcggggatggacatcatgactccttttcggcggcggcgaggaaggcttccaggccgctgcggcgtacagcgttcccggtagggtgcaggggttttctgggggtgggttcaggtttcgggtctgggaggggtttgggctcgtaggtggtgtcgatgtcttcggcgaggacgtggtcgagcaggcaggtggccggggtgtcggtagtctcgtccagctcgtcgatcatctcgtcgaggaggttgggggtggtggatgcggcccacacaggtgggatagccggtgcgggtcgaggcggtgtggggaggcggagtttggtttggccccagaggggtgtgtgggtcatgccggcgggagtggtggcggcgtgagtggtcacgcgccaccagcccgccagccatgccagaggtgaccaggtccagtcgatgcggccgatgatgaactgggcgagccatccggcggccagcgcgaagatgaaaccgcggatggtcatgcccccgtcgataattttgaagcccatcatcgcggcaggaactacgccgccgacagcgagcacctgatagatcgtgtaaggcccgccggggatctttcgacccgaagagtccttgccgatgatgcggggctgctggcgggcttcggtgtgccactggatgtccatgacttgcttccgggttctcggctctaccgggcgggagcctcaatagcggcctttgtgtgctggggaatgtccatgtcagcccttgcccagtccctgcatcatctgtccgaagaattggatggcgttgccttggatgagccagtacgccatgccacagacgaacagcatggagacgattttcgcgaggctcatgccgtgtcggaagatgttgaacgcggcgagggccatgactgcgagcatggcgacggctcgcactgcggagtttccttcacctgccttagttgtggtccattcgaagaggttctgcgattccagtggcagcaggaggaattgatcgagcatgagaggttttcctttcaggaagccgaccgggatggtcccggtactgacgggctgggcgacacgggtgtgccgtccggaggcagaaggcgtgacggctggtcgagggaggcaacctcccagcggcctgcacgactgacaagagtcaggccgtactggctagtccgggtagtggattcgtcaccggttagctggcatgtcacggtcgcggtgacagcgatcttctgccgatctgagggggtggggatctcgtcaggccccaccacatgagtggttttcaccgatacacacggggctgggtcaatcgccgtgaaagcggtccccgggctactccatctcgacaggtcgtcgctgccactcagcatcgcggccaagaaacccgaagaggtctgggcagccgggtcagcaggacgaatctccgaggagtccacgtcgggggctgaggccggtgcaggcatggggatctgcccaggcaagcgaagagcgatagctttgccgccggcatcgacgtggaccggaaccgaccaggcctgtccgctcccggattggccgcccatggtgatcactgtgacctgccacaggctcggatcagacggggagacggtagcgtcataggcggtgacggtggtgggcgctggaccaggtttgcggggcaaccgagcatcggtgatcttggacgccactaagtggcccagattgtctaggctctcagagtcagatgtcagcagcagagtcgtcacttcgactgcggtagctgaagctatctgagctgtgcggcgatcgtgatgggtggtatcagcgctgacagctgtagcgggggcatgcgaagggaccgccgaacggatcagagcgacaggaccacacgcgaccccgcacagcactaaagcgaggaagcccttagtggacactgatccggcgtggggccaggggctagcttcttcttgtgtctgcttcttcttggccaaccagcgacggcgaggcctggggttagcggattcgccttctgagttgtgtgctcgtcccagtcgcataggtcacctccttcattcactgcatgaagggatggggcgggtggccgatgtgcggtcaagtgcgaaaaaagttcaaattttttcgcgggctgtcacaaccacgattacagcggggttggtagcaggtttcacgacaccgcaggtatgtgagcctcacaaggggaacccctgagatacagaaacccagcaagttaagcgagtcgggcccaggcgggacggtcgagtgttgacgagaggtaggcgactcaggctggtggcttgccacgccgccagctccgtctggatgctgccacgaatgcgcgcctcgatgtcatggcggctgagactggacgcagtgcttccgacattatgcgcaccgccctcgtcaattatctcgacgttgccagctgagttcgggcatcccagacagtgggggcagaccaacggatcgcccccacgtacgcgtggcgagccgttatcgtcgccacactcggacggtgtcggtggtctttaggggtgccccttcgggtcccttgaggtagctgttgatccatcggggccggtgggagtgatcactggggtggtattgctggcgccagtggccgcgcacgaggaatcgcgtgtgaaggcggcgtcctgtcccgtcgcggtcggtggcgggttgggtgcgcagaggtcgcagatcgacgattgtcactggtgaggtcgactcaccggtacgggtggcccgctgcacgtcgcggcgcgactggtcgcggcggcggcgttcggcgacttgcggctgggccatgagggtccaggtggcccccacgagcgccatgaccgcgccgacctcggggcacgcgggggcgtaagcaccggaagtaccgtctccgtcgaggggcacactcacgacgtttccgacacgcaccgacgtggcctggtcgtcgaggacgaggatgacttggagctgggcgccgatgacgccccacaagacaccgcgcagtggctggcgaactgtcaagggtgctgccgcactcgcctggtaggccgtcaggcaagtgactggcggcagtggtccggcccacatgagtaggccggtcgggcacggtagggctgccgcgacggtccaggcgggcatatcagtcgacgcgtcaagggccagcgcggtcatgtcacggctgacccagtacaagtcagcttggcggactcgcgtagaccattgcggcgtaccgggcggggctggatgacctcgccgtgtcatgtcagcatcgagggcctccacctcggcggccatggccgccctgcacgctggcatatccttgccctgttcgattcttctcgtcatggttctgtcttctgcccggggctgcttcgatacccctatcatggacacatgataaccgcaatgccaacaattacggggtttcttgacttttttgcacccgattggagaggatcggcggactggaaaatcgctgtcgaatggcgcgctttcggggccgcgaatgaatagttcaatccattgcagccgccgcaattttcgaccctgtccgtaggactcatggatccaatgtccccgcacgatgtgcggggtcatcaggtggcgacccaagggcgaaagcaatagcgattatgcggacagtttggcaccgcgtagatcagcgccggtcaggttagcgttggacagatcaacgtcgtgcaggctaacgccgcgtagatctacgcggcgttaggcaggtcagcacgccacaggctagcgtcgcgtaggttggtaccgtacagtatgacactgcatagatcgacatcgtgtaggtcaacgctggacaaattgatactgaataggctaacgccgcatagatcggctcgcgtgttatttttatgcgccgccgcgacaattgcgagcacttcttcgcgattcataattcctccatatggtctaatttttgttggcgtcatttcgcctttgtcgtcacggtagtggtgacacctgggcggaacctccatgtcgacatgttcatagtagatatgctgtggcgtctattttatggtggattccttatttctgggcgaggtagttgtagatggtttgtcgggtggtggatagggcgcgggcggtgtcggtgatggtgtggcctgcactggtgaggtggcgggcgaggacctggtaggcggctctgcgagcggtttcgtgggtgtcggggattcctgtggtgaggggtcctagccagtcggcggcggcagtggcggcgcgtggaccccagacgtgccaccaggcgtcgacggcgggctcgacccacagtccgcggcgtaggaaggcatcggtgttgagggcttcgacgaggtgggcggcgccggcgaggtaattgcgggcagggttatggatggcgtgggcgatagctacggcgaggcgggcgaggtcgtcgtcttcgacgactgcgcgcaggattgcgagggaggcgtggacgtctccggtgcggatgtctgtgtcggtgatcgcggtgagggcgtggacatagagggggggttcggggttatcagcccaggcggcttggatcgcgccgatggcggcgcgtacgaggtgatggcgggctgcgtcgaggtcggtggactccatgaccacatcggtgaggatcgtggatagcgtgctggtcttgtcggtgaggatggctgcctctggccgatcggacgtgagtgcggtctggaaacgctgaggatcgaagaattcgaccatcgttagcatcgtggcgcggttgacccaggcggctagtggagggcctgagagtggatcagtggtggcggcatagtacgccagtcgctgctgggatgtcatggagtgtcctttcagtgtcataccgttcgggggcattgctcgcttctattatagacatatatttccccttagtgtcaacaatgacgatcccgtgtgggacgtcaggttttcagggtgctcgggtggcgggcatgtcagtgcgggacaccgctgctgcagtgaagttcttgtctgggccaccggtgaggcgcgagtcctttagcattactggcggctagttgctgcgcccatggatgggcgcactatcaggccgtggtcacatccactattgggcccgcgcgaatcaggtggtgattgctcacaggctggagtgaatgatggctcatccaggtgagacggtagctgcggtggtatgccacgcgtgcgacaacgctaggtgccagaatccgtcacatttggtggccggtaccgtgactcgcaatcggcgggagtacgtgagacgagcaggagctccaggaacaccgttaaatgacgtgcatggcccgcggggtgggcgaaattgtccaagacatcgttggcgtggaagtcgtgacggtgaacggtgccgggctagtgctcatgactgccgttcttgctaaatacgtcccgtacagaaacttttatcacgtggccggagctgtagttgtgtacgcgtgtcttgccgctgcggcggcagtgccgttttggtacatcgtcggcgtaagcggtacccaactgctcatccggcaactgatcatgtaggacgcagcgcacggcgtgccgaattaccgacgttggtcggcgcggtgtttatcggaaggctagcttcatccgcgacgcgagacatctcacgtagctcgcggcgacaatggtgacctaatcactgtggagccggtatcgctcgatgatctgcgtggaaactggacggccgaccgcgggtatctcgtcggcgatggggtggcgccgacaatcgccagtctgcagctgatctgaggtcataatcctttatctatgtcgtagcgcctgggaggcactccccagggtcgtcgtgtgtgcggaggtagggccgaaggctttggcgagataggcgacggccccccaacgctgctcgatagtgacgactcgacgactggtcgatcaactagtgtgggccggtctcccggcccacactgtgatgatcaatcggtcagactcgacgcgtcgccgcgtataggtctgtccccgaaatatcgtcgaggatccggtcaccgaagtatcgcagcgtaatttctgatgctacgtcggacagtaaccccatcgtgacttttacgacattccgacgccgtgctgacgccgacagtccccctaggctgaattgcgtcgtcccaagccactgccagtcgtcaatccacagaccgtcgccacgggtgtcggtgtggaactcggcatgggctgggacgactgtgccatcgccgagctggtagtacgagtcgacagtccacgctaggcgacccgcctcatcgcggtggatccggccgatggtgatccgatccaggtcatcagtgctaatctcggtcatgtcagaggtcctttctctgtcacgccctcggggagttgccgctcctgcgggggcttcctttgttttgatacctctattatagacacacagattcgatgatgtcaacaaatatcggggaaattcttggcttttttctgcgactttcgctgcggccggtcactgtgtcacctcgtcgatcgcggcgagggtagcttgcgtgagcgccccccagtttgctcggtacgtggtgcacgccggtcgtgccgagaagatcatatccagccccacgcggatcgtcgcacatgtcatcccagtcgtagttgctgtcgtattcgctgatatgggtccatgtcgtgacagtgaagccggtcctcatgacccgcacccacctcctgccggcaccgctccacggcacagccaccccactgactgtagtcgaggcggcatcaatccccaccaacatcgacttcgagaccatagaggcccggaaggtgcagcccggcggaggcatggcccacctgtcagcagaccgagcccgcccgatcctccaggttgcctcctggctgagcgcggcctggatactcatggccacccccaccgtggccgagcccagctcgacatgcgactcatgcgccaggttcacgccgtcactgacccgaccggccgacggctgacgaccgcgcacaatatgcctggtcgttttaggttgattacagctcccccgagctcaggtgacagggcgtttggctaaggcgttcacggcatcgctgatgatttgtttgagggtggtcccgggatgggtggctttctgatgggttagccattggtcaatgtcggcgggcagctggaaagagcgtggctgaccgggggtgcgcacggtgtgggttccgaagccgttaagggcggccgggggttgttccatatcggcggccacggctagagcatggccgatgatcgcagcgatgctatgcgaggggtggtcggcctgccatccggccaggagggattcagcgtcgtcggtgagagtgacaccgcgctggcgacggtcggttcctagatctagggcgggcagggtttctatgacggggttgtcgagccaggcacgtagcgcggcgtggacagtggcggtcatggtgccggagaccctttccagggcggtgtcgatcttgggatccaagcgcacctgaacggatccggggccctcggggagtttcccggccggtcctccgcggcgaggttggacggtgtcagccccggccacgcccagatgacggcgtagcgcagcccgcacgatggttgccttggggacgccgagttcctgggcggccgacgctagagagcgatggaggtcggcgggcaggtggaagaccctgggggtcgggtgggtgcgtttgttgctggggctctttgtcggctcggcggtgatcgggtgagcggtgacgtagtcgtcaatgaggcatacggccaggcggtaggggcgaattccggtggtctcggccatctcatcgagggcgtcacgcatatccggggtgacggtgagcatgactgagactcctccagtgcgggatgctctggcagctcggccacgggttgaggaggggatggtgtcggggatgcccagggcctgcgatagcgcggtgcggcacacggcggcgcgggagactccgcgataggtgacgagggcgtcgagggccagggcgagggtgtcggggatgcgcaatgccagtcccgggttggtggcgtgggggcctttgggtgccatcggttcggtattggcggggtgggcagccaggtagtcggcgaggatgtgagcggccacttcagagcgactggtgtgggcggtggcagcgcggtcagccagagcggcacgtatctcgggagtgatagatagccctagctggaacgtggccccggtgtgcggggccggcgtggctccacgtcggtaacccgcgctgatcgtgtcgggtagatggaaggtttcagccagggcggttcgagcaaccgccgccagggccacattgcgcctatctgctagcgcgtcgagggtggggcctagctcgggcagatggaggggttgcggacggtcatgatggggtttcctttggtacgattgaaactgagcgcgatgcttatcgtgttcgatctgatgtgtgggtcctcgccgagtagcgagggcccacactgtgttgttgtcggtttataggtcaaggtggggtattccacacaatccgagagtcgtggttggcggcagcgttgtcgaccacgtcgaggatgtctgcagcagacgtcgtgatggtcagctgccggtctctgatggttttgtgagcagtggcttaggtggagttgccagcgtcgactagacacacgtcgatgtcaggagatagtgacgtggccaccacgttcagcttatgttaagcctagacattaacaccacggtggacaagtcctgccgtttccccttggggggctcatgctgatctggttgtccgctgtcttctcactagatgtgtgctggtttttctgctcaccggtacacactgctcattgctagacgtcgtgtctatgacatggctgggcgtctagcagacgagttgacatcacccttaggctggcagcgttcgaggccgcaggccagagaaagcggacagcctaacgattgacgtccccctctattcttctctcccgcctcccctccccccgtcccctgaaagccgctcttcatctagcgttcccccgccgccgacaccttcctcttttactcaggttgagtcgaccatccatagatagatacatatgcatcggtgtatcgatctatcgatgtatctgggtctggttttaggaggagacgctcccagctacccctagagccaggcccctgctttaagcgtgctgccaggtaatgcccccggtttggcgagcggtcacccacacaagggctgggctggttgctactcccgccagggatagcggacatcctctatacacgtctgtcagtccatctttttcgtcgtatttccccttgtcagagcgttcttctcaaagtgacaacgctagtggccttgacgacaacgtcctcgacaacctcatggcggtggtctgtgtcttgtcagatcaaccacaccgggaaagagacaccgccgatgttcaccaccacagccaccctcaacgatgaatgggaccagatccgcaccattgagatcgattggcacgactgcgctgagctgatgcactgcatcgacgttgaggatgtgctggccgtcattcctgccgcccccgacgccatcttgggctacctcattgcccgggctcagggcggtgatgagttggctactcgcaccgtcatccaagcgtttgtcggcaagctcattctaatggccactgccacgaagctgcgtcgcactaataacggtttcgatgatctgttggcgggtctgtgggagacgatcatcacctatccgttggatcgacgtcctgacaagatcgccgcgaacctcgtcctcgatacgttgcaccgagttgtgaagttctggcgtgccgattcccccgatgaggaagacgctcacggattggtgcccttccccgatactcttatcgcccccgagcccgatgaggacgtcaccgcatcccaggctattgccctggctgctgaccgtcattggatcaccgaggacctggcccgcctcatgaggcacatctactgcgacggcatgaccggagttgatgcagcccgtctgcatggttgcgctccggccacggtgcgttctcggtgtcgtgacgggcgggctgcgctacaacgcaatgccgaggagatcctggctgtctgctgatctttccctcggctcgcagccgcctccaccgatggtgcaagctagagatctagcatctcatatagttgtctagctagctagattgatagcaatttttctagctacatctctagcacatggtatagcggaattacggctggatcgctagctcaatggcatgcttgccgatggaaggtgtgtcgacctcccaaaaagctggaaggagctttaccgtgcagggcatgaccagtcccattgaccgatccccgttcgaccgcaccatcgcggtatggaaccacaagggcggcactttcaagacgtccgtcgtggcgaacctgggatacctgttcgccgccggcggtaacaaggtgctgatggtcgacatggacccccaagccaacctcgacatcgacctcggtatccctgctggggaacgcgaacgaggcgtaggactagccgaggcgctgcgtgaggggaatacccttcccccaccgcagcatctcagcgagaaccttcacctgatcagtggtggcccagccctcaacgaattcaccgaccccgcctccctcgcagccatccttgagcgggtcacaaccgcacgttacgaccttctggcccaggcgctcgcaccactagcctgggactacgacctgatcttcatcgactccgggcctgctcagactctgctatcccagaccatccttggagtagcccgctacctagtcgtgcccacccgcaccgataacgcctcgatcatcggccttgttgacgtccaggacgccatcgacggggtcgccacctgcaaccccgatctgcaactactcggcgtcgtactagccggggtaggcgcccgcgccactcggatcgccgccgataaacgccacgccattgacacggtcctgggaacaggaaccgtcttcaatgcggtcatccactactccgaaaaagtggccgtactcgcacgccaacaaggcaaaaccgtcgccgagctagccgccgaataccaccacacccagcccgcctacacctacctagcccagggcaaaaaggtccccaacgtcgccaaagcggccgtcagcatcgaaaccgactacctgcggctggccaccgagatcagtgaccgcatgtgcaccgacgacgagcaggaacccactcatgactgacgacccgacctcacccacccaaacctccaccagcgacgacatgcgcctagccgaggaatgggccaatagcggccgcacggtgggggcccttccgcaccgtcaacggcctaaaggctctattccccgcaccgccgaacagccccctgtctcgtcccctgccacccacacaccagccccgaagaaaccccagacggccacaaccacccagcccggacgccagcggatcaacgtcaccgtctacgtcgtccccgcactccacgagcaactgcgctcccggtcggcggcgacgggggtgacggtttcggatctggtggtgcaggctttagcgttcgtcgccgatcacgcagccaaggctgtcgccgatgacctgcgtgtcgagacggtccctggtgatgaggctggattgttcgatgtgaccccgtcgcggccggtgggggtcgccaaaacccagttgggggtgcggatgacccgccataacaaggctggtttggaccagctgacccagatcagcggggcccgtgaccgcagccatctcgtgtccgtcgccgtgcgcgactatctcgactccaaccctgtaaagaaaggccgacatgtccgctgagactcctgctgcttccaccgagcggcgttttgatacgaccgtcaagcccaggcggcgacccttattcgtcgcggccggtatcgccattgtggtggtcggcgcgttgctcatcacccagttaatccacgcgagccagaccgagaatcgcgtgctggaggttcatgccgatgtggctcgtggcgaggtgatacgtgacaccgatctggtggcggtaaccgtcggccaggtcgacaacgtgtcgacagttcccgctgatcagctcgactcactggtcggcaaacgcgccacggcagatcttcgagccggatcactcttgcctgccggggccattggtccagccgatgtcgttccagctccgggcaagtcgctggtcgggctgaagctagccgccggacagatccctatcggagaccttgctgccgggacgaagctgcgcctgatccagacctcggcaggcgggtcatccaccaccgggcagggcgccaccaataccgatattcaatcgtgggctgcgacgatggcgtccggcaccaaaagtactgagcaggtcaccttgatcaatgtggaggtggactcgcgtgatgcagctcggatcgcccagctgacatcgcagggccgtatcgctgtggtaaaggattcgactcgatgagcacaatcgttttgaccagtgtgtcgggagccccgggggtgaccacgacagcgattgggttggggcgggtctggccacagtccagtctggttgtcgaggacgacacccatcacgcgatgttggcgggctatctgcgagctgcccagcacgccgagccgaacttggccacggtggcaaatctgacggccactccgaccaatgcccaaaccgtgtgggaatccatcgccaggcctctgcccaccgatgatccggtcagcgggctgagacgcaaggccgtcctcggcccgcccacaccgtggtctcgtgcaggtatcgacccccggtggggattcatgctggccctgtggcggcagctggccgaggccgggatcgacaccatcatcgacctgggtcgcctagccacgccgctgacgtcaacgccacatctgatcgccacacccatcatcgacgacgccgacatgatcctggtgatgatcgaggcgacgctacgcgatgtggccggcgcccacacgatgatcgaagggctggccgagcagatgaacctggccggggcccaccagcgcctcggactgttggtccaccgcggcggcgcggcccgcggggtcgctgagttcaccgacaaagagatcacgtcggcgttgcagctaccggtctgcgggtcgatagtccatgacccagtcgcggcagcccagctgtctgacggggtcgggcagcggttcgacaagtcgcgtctagcacggtcgttgtcgaaggtggcgggcgttctcgttgatgtcattggtaggcgtcgtgctgatagcaaggaggatctgtgatgaccggtttttcggacaatccgttcgacaagttgcgctcgcgtcctgatgctgaggtgtggtcggcgtcaggggccgtgcaggtaggcatgggggaggctccggcgggggaggggcccgggtttgtttcggagttattttcggcgtcggcggggtgggccagttctcagcaggtgactcaggctcccccggtgatgacccgctcggagaaggttgattggccgattgttgcggagctggccagtacggccacagacgagattgaggccgagatcacccggtggagttccacccatgatggggtagcgacgctggacattcgtcaagccatcgcagagcctgctatcgcctcggctgtggccacgtatgctgaccggcgtcagatcgatgtgggagagacctggcctgatctggtacgtcagcgctaccgcaaggctgtgtgggatcagctgttcggaatggggcggctacagccgctgttcgaaatcggcgacgccgagaacatcattgtggtgggcaaccatgaggtggttgtcgatcacaacgatggttcccggtcgacgttaccgccggtggcggactcggacagcgagttggaatcccaaattgcccgaatggcgaggaatgcgaccccgcggcgggccttcgacgccgatcacaccgatgtgacgatcatgcatgagcagaagttccgtattcacgcgatctcttcggaggtgtcgttgcagccatcggtggtgatccgccagcacttgctgacccagatcagtttgggggacctatcacagcgcgggatgatgccagtggaggtggcccggttcctggatcaggcggtgcaagctggcaagtccattgtggtcgccggtgagcagggtgcgggcaaaacgacgtttctgcgcgcgttgatccacgccattccgatgcgcgagcggttcgccaccttggagaccgatcaggagctgttcgctcacttgatgccgggccgacaagacacgctggtgttgttcgcccgtgacggtaacggcgaggtggatccggcgactggcacccagcacggtgctatcgagatcgcccagctcattccccctagtctgcgccaggcgttgacccgggtcatcgttggtgaggtgcgcggaaatgaggcctcggcgatgtttcaggctatgcagtcggggactggcactatgagcagtatccactccccgcgagcctctgaggtgccgtcccggctagcccagatgatttcgatgggtccggtctatgacctggatcaggccatgctccaaattggtcattccatcgactacatcgtcttcgtgcgcaagcgtgacctgtctgacgggacccggctgcggttcgtcgagcagatccgttcggtttcacctggcgattcgacgactcccagtcttggcgaggtgtatacggccgattcgtggacaggtcagccgttaaccccgcttatgcctggttcagcggccgatgagttgtctcatttcgcccgcgacttggattattgcgaggcccactcatgaacgcacctgcactgaccagcgccctcatcgtgaccgggttggggctgatcttggttatcgacggtctagtgccctcaacgcctcgtcctggagccgcgctaagcccggcccagaggtgggccaggctcacccaccgtcccgctggtgcggccgggcgtcgccgggatttgcgttgggggttggctgttcttgtcggtgtcgtgttgtttgtgctcaccgggtgggtggctgcgctggcgttgggccccattattgcgctgctggcccccaccttgctgggggcggccccaccgaccgatattccgctcatggaggcgctggatcggtgggtgaggcaggtggctgcggtgctaccccaggggcgcgacatcatcacagcggtgcggatctcgaggccgcgggctccgaaaatgattgccgagtcggtggaccagttggtgtctcggctggacggacggatggagccgcgcgaggcatttcagaggatggccgacaagctggactcggctgaggctgacgcggtgctggcctctctggcgttggcggccactcatccgcggggtgcctcgacgacattgaaggctattgctggcaacattcagcagcggttaaaagtgctgcggcaggtggaggctgagcggtctaagccgcgcaattcggtgcgtcagatcacgctggttacgatcgccatgttcggggcgctgctggttattgggcgggcgttcctggccccattggcaacccctcctggtcagatcctggtagccgtggcggtggtcatgtatgtcaccgcattagtgcagatgtatcggatggcgcgcccgcggcaccgcacgcggatcatggttaggaggagtcgatgacgacgactgcgttgtccctgctggccggggctattgtcaccgtcgggttgttggtcatcgtggcagcgttccggcctgccccaggccctgatctagtagccgccttggacgtggtatcgggtcgcacctcggcccttgacgagcaggtctaccagacccgggtcgggcgtttaggtcgcagcgtgacccgcacgttccatgtgtcggtgtcgccggcgatgcgagccgcgctgcggttgcagggcgctacccccgaggcgttctacgggcgtcgtttgatttgggcgttatgtggggcgatcctgccatggctactcaacgcggtggctatcgcggtgggggtgaatttcccgggcttgctcatccctgcggcgctgtgtgtggcgctggctggagctgggtggatgctgccggcggcacggttgagggctgcggccggacccaccaacgatgactcgttcgaggcgctgctggtgtttatcgacttggtcgtgttggaaaggctcgccaacgagacctccgtcgacgcgctcaccaacgcggcgaacatgtcagatgccccactgttcgtccagatccgtcaggtcctcaaccgtgccgccctggaaaacgtcgacccgtggaacggactcgaccggctcgctgacgacattaagctgcccgaactcaccgatgtggtctccatcgcccgcctccaggaggaaggcgcttccttagtcgatagtttccgggcccgggtcgccgagttgcgcgacgcctacttgctgcgcttgcagcaagagtccaccacgatcacccagcgccttggcctgtggacgatcctgcaagccggatcggtcatgctcatcttgatgggggcggccgcgctcacactgattacagccggataaaccgacatcgtgtcgagcccccatatgggccgcgaacctttcataatgatgcctgtaagcaccacaatattgatcacaacctaacaatgaaggagaaatcatgatgaccgatctcgacctggctaaaaaacagatcacctggctggcggcgcacctgcgttcccggatcgttgacgagcgtggcggtggtagctctaccgtggagacactgatttggattggtcttgtcgtggcaacggtggttgctgtgggcgccgtggtgatggcattcatcaagtcgaagatgcctcactgacgacgatgcgtagcaggttcacaactgatcagcgtggcggtggtagcgcgtcggtggggatgctcctgctgatgcctgcgatcatgctgctggcattcggtgggatcgaggtcgggatgtggtgtcacgcccatcagtcgaccatcgcggcagcccaaagcgccgcggaggctcagcgtgtcgtccatccagctccggggtcggcacaggaggcagcctcgcagatcactagtcatggcggggtgcgtgatgcgcgggtgtcggtgcgtgatgatggttccactgtcacggtgaccgtctcaggtcgggccccatcgatgctggggctgcatcttccggctgtgtcgtcgacagcgtcgatgcccaaggagcgcctgtcgtgaggcgaagtgagcgcggtggagcaagtctaagcgtcgaggtgctcatgtgggcgccgatcgcgctggtgatcatcgggtttgttgtgggtatcggccggatgtcgatggcccaggacgcggtgagtggcgcggcgggggctgcggcccgtgcggcgtcgttggagcgtgatggacagtcggctcagtctgcggcacagcaggcggcgtcggcaaacctgtcgtccggtgggctggcatgtgcgccgagtgtgagcgtggacacgtcagtgtttgcccgtcctgccgggcaggcgggcacggttcacgccacggtcacatgtgtcacctcgctgggtcttgggttcgggtcccggacggtgcacgcaacggggtctgccccggtagacacctatcgggaaaggagaggctgagatggcccgcgatgagcgtggtggcggctcggtgtcggtgtggatgctgctcatggtgccagtgattctggtcatggccggcctggtttttgacgggtcccgtcagatatcggcaacccaggcggcccaggacgcggcggttgcggcatcccgcgccggaactgatgcggcagcgacaccgcagctagctggccacgacggggcggccgtagcagtccaagcggcccgccaggcactatctgctgccggggtggacgggtcggtgcaggaggacgggtcgaccatcacggtgaccacgtctcaaagtcggccgacagtgttcctgtcagcgatcggaatcagccaggtaagggggcatgggcaggcccatgctcagcttgtgggaccgggagaacgcccatgacagtgatacgtcgtatcggtgccctggtggcactgcttgtggtgatagccggcttaccggccgggctcgtggccgcaggcgccccgctagtaccctcgggcctgtcatgggcccatgtgcggcatctgttggttaccccagacatgaccgggtctgtgctggtgtggctggtcagcctcatcggctggatcgggtgggcatggttcgccctggccgtcgcagccgaagcggtgacgatgctctcagggcagcggctgcactggcacatgcccggccctcgcctagtgcgccgagtggcagccggtcttctcattgccgcgttcgcggccgcaccggcagccacaagcacggctcacgccgccgaggccacccatgtggcggtcgccgcccaggctggaccggcacacgcggcccccgcccaggacagccccgccaccacctctcaggccccggacgcctccaccactccgaaaatctggaagacctacacggtgcgggccaacgactacctgtggaagatcgccgagcactactacggtgacggcgcccaattccgtcgtatcgccgaagcctccggtatcgacccgcactcagagctgaaagtcggccagaaactggtgctaccggttcccgagaacacggccgcagttcattcggttaaagcgggggagtatctgtgggagatcgccgagcactactacggtgacggtgcccagtaccataaaatcgctgaagcttccggtatcgatgcccattccgatctagccgtgggccaaaaactcgtcatccccgggcccctccgccacgacgccacgccgccacaccactcggcgtcgacccacgcgaaggccgccaccccagcccacacgcccacgcgacggcctgcgcctgcccacaaagccacgcccgccccgacgccggccaccccaactactccgacccacacggtgaccccagctccggcctctgccggccactcgaccagcgacgagcacccaatccatacggataccgccgcagcggacaaggccagcgacgaggacgccctgtccccaatccaggtgggtttgaccgccagcgtcggactggtgctggtcgccggactgatcaccaccctcaaccgccgctaccggacccggttcacccgccagccccgcggcaaggccatgaccctgcccagcccggacgcccaaactgccgagatagcgctgcgcagcaccggggcgactgacactctgacgatcacctgcctcgaccaggcgctccgcgcgatcggcgcatggtgccaccactgcgggcacccgctgccacccctgctggccgcccgcgtcgacgacgaccggatcgacctgctgttatcgcaggtgacccccgaccatcccgaggcggtggagctggccgccgacggatcggtgtggaccctcaccgccgaccggatcgacgacctgctagcccacaccgatgacaaccaagcggctccgtggccgtctctggtcacactgggacgcgacgacgacggcgcccacatcctcatcgacttggaagccgccggaaccttgcacctgatcgccgacgacgaccaggtcgacgcggccctcgccgcgatcgccgtggaactggccacctgtgactggtccgacgaagtcaacgtcaccctcgtcggccaggtgtgcccgggcctagaagaggccttgggctctccaaccttgactcgcgccgccaccgtcgacgctctcttggagacgttggaggctcgcgccgacgatcagcgtcacgttctcgccgaaggaggctccctggccactcgccgagccgacccggctatctccgacgggtttgacgctgaggtgatccttcttgacaccgacctgaccgagtcccagcgttaccggctcaccgacctgatcaaggacctgccccgggtgtcggtggccgcggtgacgaccagctccaccaatccggatgactgggccctgagcttctcaggtgacccgctggtcgcagagttggtccccctcggctggcacatcaccccccagaccctctccccagatctctacggccgcgtggtcgaactgctagacaactctgcggccgacgactacgcacccgccgactggtgggaccatgacgccgaagaaactgacgaggatgagcctgtcactaccagtaggcgagcccgccctagtatccgcttgaccaccctgaccggtggtatcgatttatccagcgtcgacattgacgccatcattgatgacgccaacgaggctctcgatgctgaagagactaacggcggggtttgtgttgatgctgcccagcctggcactaataccccgttccctatcgatgaggttgacccgttaagtggtgacggtccggtcctgtcgatcattggtcatcccgacatcatcggtgccgctgggacgaagggccgctctccatggcgctgccagcagttggccctttacatcgctgagcatccgggagcatcaggagccactatcgccgacgacctaggtctctcacccgcaactattcgttctatgaccacgcacctgcgccgctggttgggtgctgacgggaacggggtggcctacatgccccccgccacgcacggctaccggcttgatgagcgggtcgtcactgatgtggatttgattgatgctgctttggctgggcgaggcatcaataccgccgacaccaccactcttgtcgctatcctcaaactcagccgaggccgaatattcgccggaattcccgactcagacctccgacagttccgagcatccacgtaccacattgaagcccggatcgttgatgcggctcttcaggtgacggatcgggctttggaggccggggacttggatctagcccggtgggcactcacccaagggctactagcatctcccgatcatgaggacctggtagctggatgtgtgcgcaccgagtaccaggccgggaacatggacaaggtcgctgagctggttgatcatctatcggctaccgcgcgacgcctgggtgtcgatttgaacgaggacactacccggattatcgatacagtcactcacttgggcaggaaagcctcatgaatgctcctgcgcctcatttgttttgctagaaaggttttcatgcatcatcatcgcatcatcgtggctgcggtagcagtcgctgctcttacggtcggctgccactcgacaggctcaacatcggcccctacaccggcaccaagtgcctccacggtctcggcgagtcctgcccctagcccgacccccacggcgggggcgatcagcgcgaccgacgccgaaaacatctaccgcaccttgcacaccaacgtcttcgagttggagaagaagggtggcctggtacccggggaacccgcacccgcgaccctgtcgaactacgccaccggccaggccctcaagaactacatgaccttcatgcaccaaatctcgggtctaggtctcacatggaagtcgggagcctcaaagatcactgtggtgcgggagaaaaagggtgataccacctaccccgaggccgctatcgccttggaatcgtgcgaagacggcagctccatccgatcggtggaccgccacggacaggctgaccatggccggctcacacacgtcgacagttggtatgcccgcgataagaagggcaccatcaaaatgatcgcacgtaacggagtggaggtttcctcatgcgacgtcaagtaatcaccgcggccgtgctgggcctgaccctggccaccacctccctgcccgccctcgcagataatggagacttcagtggccatacagacacggatggtcctggttacgatgtgcgtactgaggtggattaccatcacaccaccggtggtgcgggtgggggtgccacgacagggggccatcatgggggcaaaacccacggtgatggtgaaggtgaggctattgatgggcgttctcgcgccgatgccgaagccgaactagacgaagccgaccgtaaccaggacttgacttgtgatgtcatgctcccaccggcgccgaataccccagccggccaggaatgggcgaaagaatgcaatcccccagcgaaaaaggggcagaaggccaccccgaagcccgacccggtgttagtgggccgtcacgcagccttgcagctcacccttcccggcgcggcccctcgtatcgatccgtcccccgaccttaaccggtggcactcggcagcagtgggccaggctttgtggttgtcagttgatgaccccaccgccactacacagaaatcgatcacgtttatgggccaggttgtctcgttgagcgccaaacgtaacggtttgtcgtttgatatgggtgatggtcatgtcgtgcactgtgatgccacgacgacatggacggagtcggtggaaccggggaccccctcacccacgtgcggttacacctaccaacaggcagccccggccgggggctataaggtcaccgcgatcacttcgtgggatgtgacctggtcggtactaggacacacgggcacagtgcatgttgagaaagccggtgggcagatgcttcccgtcggcgaggtggagtcggttgtcacccgccaatgacccctgataacccgagtctctacgaggtgttggggataccaccacaggcatccccaacacagatcaaagaggcatggcgcaccaccgcgaaagcgacccaccctgatgccggtggcaccaacgaggccttcacaaccgcccagcacgcctgggaagtgctgtctgatcccgaacagcgtgctgcctacgatgccgccctatcgggggaggacgcctctgaccaggaggcccttgacggcactgtggacgtcgaccccctcgccgagtggccttggtgtgtccccttcctcgaggccaccccacgactgcgccacccgtgccccggcatagttgagtctgtcgtcgtggccgccgccgggatcatgaccggcatcggctggcacgagctattgaaatcacttgtcgtggccccggggttcgtgggggcgtggtgggtgatttcggttccattggtcgtggcagtgacatggctcggcgcgatcacggggatttgcgccatcatggccgggctcgtctggctgggatggggtctgatcggtggtgcggccttgtggggtcagccgtgggtggtcactgcgatagcaaccgggtgggtggcctgggtggccggtgtggtgtggtggtggcaccgacggatggcctggcctgcccgcacctgccgggcaggaaacatgattgacatgcccgaggatgacccgccgtgggtagaaccggtggagttggtggcagaactcatcccctccgtgcgggctatgtggtcccctgataggcaaaccgttgtcgtgatagccggtcggcgggtagcgacgttagggatgccgatgcgagggtggcgtggcatcgatatgcggggctggaacccgatcggtgccgacaccgcgtggatcgttgaccagataggcggctggctggccgaccaagacaaaccgctcaccatcgacgggcgcatcttgtacgagacctgggacaggctacagacagttcgtcctcacagctgagaaaaattttgggtccgccctgcatatcggggcctcttcataccttcaaaagtgtgaagggaatacagactcttcgactggaattaaaatggtatatggcgtgtccggtccgcacccagctccacgatgcgccatagaggagccataacttcaccaatcgtatacgatatgagtgtaggtgagcatctaccggtggccgacagtcagatacaagcatgggcggatgaagcagaagctgattatgacctcagcatgcttccgccgtctcgacgtggtcgcccaccggtggggaggggcccgggcactgtggtccctgtgcgcttcgacgcggacactctcaaggcgttgtcacaacgagcccctgacgaaggattgaccacgcgttctgacgcgatccgtgctgcggttaaccagtggctcggcctcggctcgtaaacattatcggcgcgacaaccttactgatgacgctgttggttacgccgtagagcacatcttgtactcgtgggcgctcgacgatgccgatgatcctcgttgctggatgatgattcggtgttgacccagctggcctcctcatggagctagttatcctcatctacgacgatggctatgaactcctgatccacgccatgaaagcccgccctcagtatctgagctacttcgctatctagtgttgttgggcgagttgaactcaacttttctccgacgcaagcgccaataaaaggctgatccatccgaataccaccaaacacggctgaagtgtggaacagattcagcaagacagggtgcggtgctcgggtgcgttggggagatgaggatattcaggcttctggcgggatgtggcttgatgacgtccaggatcaccggttcggttttgaaggtgccttgcattaatgtcgacagggtcgtacgactcgaggactggatcgaccagcccgttgcgtctgaagaacttcatccaccccggtggagctccggccgcgtactggtgcaacggatcattagcatgggtagcgtgagtatgccttcgatcgtggtcagtgctgtcatcatccaagattctgacgggcggcttctcactgtccgtaaacgaggcgccgaggcattcatgctgccaggcggcaagccggagcccggcgaggactcgcgtcaggcagtagtccgggaagtgcacgaagagctcggcgtctcattgtcttccgacgacctgcgtcgggtgggagtgttcaccacgcgagcagcgaatgaggccggccatcaggtggtggcgacgattttcacccacaccccggttgcggtgagtgagccagctgctgagatcgagcagattcgttggctcgattggagtgtcgacgccctgcctgatgacctggccccgctgctggtcgaggcagtcatcccgtggctgcggcgccgtatccggtcggtcgctgtattcacgggtgcgaaggatggaaccgaccctcattatcgtgtcgaagcaaccgccttgggccggggtctcgcacacgccgggatcaccctggtttatggcggcgggaaggtcgggatgatgggtgctgttgctgatgcggccctcgctgctggcggcgctgtgatcggagtgatgccgcagcacttggtggacggggagatcgcccatcctagtctgactcacctcgaggtagtgcggactatgcatgagcgcaagcagcggatgagtgacctagctgacgcgttcgtcgcgctacccggcggcggcggaacccttgacgagctattcgaagcatggacatggcagcagctcggtgtacacagcaaacccgtggccttgtacgactcgaccttctgggcaccgctgaccgcgctactcaaccacatgaccatcgaaggcttcatccgccctgaggaccgcgcctcgctcgtgatcgccgataccatacatcagctgatggccgatcttgagggatggaccccaccaccaccgaagtggcgctcgtgacatagaacaaatgattctgactatggctcattgacatctgcgcagcggctactagctccattgacttcaaatcgggccttggccgaggctcggttcaggtggcccggaatggatccccacaaattgaatgctcatgatcgaggtgatgaacgcccactctattgtcctacgcccggttgtatccagcgagcaattgaaggtgctgcgcctgttggtcgaccaggccgagccactcatcatcgacgggcgcatcttgtacgaggcatgggacaggctgcaaacagcccgtccggcccgctagaaaaaatttttagggcccgctccgcacatcccggtctgtacccacaccttcaagggtgtgaagggaataaaaacacacctaacaacaactttgtttcatgatttggcgcgtcggacccttcctgaccgatgtcgtgcgcaacaatggacccatgagttcgcctaccaagatgcgccggaagggaacacgcggcccgaaacctcgcagcgacgaggagctaacggctgtgatgtgccgcatcccagagtcagtggccgaacgtgtcagcgatatggcttgggagctgaggctctcccgatccgatcttgtgggctggtcggccctctatgcactcaactcgatgctcagacagcgcggagaggacacgattccggttccggagtatctggacaaggccgtgctcactgcgttgtatcccgatgggttgcccttcgacgaggacaacgaggagccgggcgagaatgccgggcaggaggagcttgcgatgactggatgagcccgaacatggttgaaggccgccccgccaggcgaccttcaatcaatggtttcggttgtcagctgcagccacccttgccaggtgctgtggttcttctccagaggaggagggaccgccatgaagaccaagaagacctagaagatccaaaagaaccggtttcagcttttgcttcggtcttcatggtagctgatagcccgcgtcgttggaagtgcgacgacgccgatcctcatcggtatcgcaccctgaaacagggtgttgaacatgaagggttgaccgctatgtcaagccatgagacgccctcccggagggcgtcatgaccgctttaattcaagctctgccgacagctgaactgtctgctggacctggtgctagcagtccagctagaccctctgctgagggcttcatcaagattcatcacgacctcattagtgcgggcgtgtcggggaacgcgatggcgttgttcgtcgcgttacgtaaccagcccggctgtgatcagtggacccgtcactcgtacctgcggctagcccaatggtgcggctgggatgggctgtcggaggcggcgggctgtaagcgggtgcagcgggccgctgctgagctcgctagcggtggttggctggaatcgcgggtcggccatgatcgtcgcaccgctaagacgctggtgtggcatcggttgaccagccccgacaccgaccgctgggagcaattgccgcggattgtgtgggcgaggatctgccagatcgccggggagacgtcgggagagtgggtgaggcattggctggtgtggcggatgctggccggtcgtactggtgtggctcaggcccctacgaccatcgtggcccggttcctgggctgttcttcgcgccaggtctcccatatccgtggggctctcgttgatgccggtctgctcggctgtgacgaggtgtcgggggcggcgagccgggtgtggttcccctcgatggccgaggagtgtgcagcggatcgtgaggtggtcgatggggccgtcgtcgatgctgaggtgggctctggtgaaggtgtcgaggagggcggggaacccctgtcgattttgtccacccacccctgtcgattttgtccacccacccctgtcgattttgtccgccaagtattagacaaaccattagacagtgaattagaccctgggtcgcgtcagcgtgttagctcaccaacgcgcgcgcgcgcggcggccgagccgccgaagccaacgaaccccacaccaccaacgcctgaaccagcagcccccgcttcagacagtcctgtgtcagcgcacgctgatgaggctgccgagttggcgtggcagttcgtggggtggtgtcctcagctggtaggggcaccaaagaaggtgcgtggccagctccgtcagatggttgccaagcagatccgtctccatcgtgcctggctggatgtgccggcgttgactgttgccgctgagcgagtccgggaaatcggggcgctgggtgatcggcactgcgagatcgttcgagaaacgttgcatggcgtgatcgccgaccgcaaggcagctcccccagccccctcaccctcaccagacgaaggagacacgactgtgtggatttacaaagaccctcatgagactcttgacgagtttgcggccaggactgagccctctcgtgtgtgggaggtctccgagcgcgatgacatggctggcgggatcgccgtgaacttgctggcggctaagccggatgatccgatgggctggctgactcgccggcaaaccatgctgatggtccggttcccccaagccgtcgacgaggtcgtagagatgtgtcacatcgtgcgcgccgccttggaggccgacatggccgccggaacccggtgggaggaccgatgaggtcactgcggcgaaacatcatggttgtggctggtgtgctcggcgtcgcggtagcggcgggcccgaccttagccaggtcgttgccgtttgctgccgacacgacaccgacgagcagaaccgctactgccccggctacggtcggtgcgggggccgctgctggggcgttgaaccgtctgccagtcaaaggcaaagcagcgatgaccggatacagccggactcaattcgggcaggcgtggaccgatgacaccgaccgggaactgacccgcccctggggccacaacggatgcgacacccgcaacgatgccctggcccgcgacctggtcgaggcccacctgaaacccggatcacgatgcgtggtcgcctctggtcgcctccacgacccctacaccggggccacactcgcctggcggcgcggccggcacacctcaacggcagtccaaatcgaccatgtagtcgccctcgggaacgcctgggtcaccggggcccaacacctcccagcaccgacgcggcgcgctcttgcgaacgacccactgaacctggtggccgtcgacgggcctgccaacgaagctaaacgcgacggggacgcagccacctggctaccgcctaacaaggcctaccggtgcgactacgtggcccgccagatcgcagtcaaaacgaaataccagctctgggtcacccccgcagaaaaaaccgctatggcgcgggtactagaccgctgcccagcccagacacttcccacaggagccacacgatgaccacccattggacccccgaacaactcctagaacccggaatcggagtcatcctcgacaccgaaaccaccgacctggacgggcgcatcatcgaaatatcgatcattgacgcagcaaccgggacagtcctgatgaaccaactcatcaacccccaaggagccccgatctacgccgaggcccgcaccgtccaccacatcagccccgacgatctcgcgacagcccccacgttcacccaggtgtggccccggctggaggatgtggtggccgatcgggtcgtcatggcctggaacgccccctttgatcagggacgtatcgaagccgagtatggcctcgcagggctggatgctccggcgtggccgtggtgctgcctgatgcgtttagaagcggccatgatgggctgccgatggcggcgactagacgggccacaccggggcctcggcgacgtgatagcagccaggcagaggcttatagcgttgcagcagatgccgtcgatgccagccaccgcctagaacaccagcactgacaggcgcccgagtggattggggttggatcaggcaggcagataggtgtcgagggcgtcgcggatgacctgggaggcgctggtgacggtctgggctgcgtaggcgtcgagtcgggcgttggtgcgtgcgtcgaggcggacctgacggcgaggtgaccgcccctggccggtagcgcggtctgagccgagtgccggccgtcctcggccgaggaatgcgcggctggcgcgcgcggcgtccttgccgtggaacaccgggctggtttgcggggtctgggttgcctcgtcactctcagcccactcggccagagcgtcgacatcgaacccggcaggggtggtgctcatgctcgctctccgttcagcttggtgatggtcgtggctcgcctgatcgtttcgccacggcggcaacagggagcggctgggtgtggggcggggccgggctgggccc

SEQ ID NO: 189 - DNA, 15010 bp, Propionibacterium acnes
  source 1..15010: mol_type = genomic DNA
ggccgccaagaaacccaacgccagcgccgcagcaatcgccgcacgcgcacccgtagcccacgcccctgccgtacgtcccctcatcatcttgacgaccacgcccacaccggcgcacgtcgtcagcaacgtcaacaccgttccaccccagctgtccgctcccagcggggccaaaaccttgtcgtggatgtcgttctgtaaccccaccagcgggccggtaatccacccgacccagctcatcgccacggtccagtccaacaaccggcacagcaacgcaatgaccatcaggtacgtgttccaacacatgccaataatggaggcccacatactcttcagcggggccgtaacgccaccatcgtccatcgacatctggtactgaaacaagtgaataccgttggagtcagtcacattgaaaccgtcacccatccagcccagccccgggcccgatgccatggcaggcacactgctcagcgccaccaccagaaccagcgtggtgacgatgatacggaaccgccgctccccggccccggggcggcgtggatgacggctcacgctgtctcccggtcgtgctcgggcgggttggagctggcggcttcgcggtggggagcgtaggcaggtctcagtagtcgaatttcaccgacgttgccgtgttggtcggcgtacaggccacaaccggggcctccggggttgagggcaatcttgaccaggtcagcgaactcttcaggggacgttttagggtccacgcccaggaactcgacacctttctgggcgaggttgatgttgtcgcacagcaacacgatgcgatgctgaatgaggttgcggacggtctcgttggggtaatcggcctcggggtcgtgggagccggtgataagccaggcgttggctcggcgggattcgcgcacgtactcgtcaatggcgtgggaggcttccggcgaggacgacatgtgatgaaactcgtcaacgatgaaagcggcgtcgcgggcccggtcgctgaagcacaccaggcgagccagacgggcaatgagcgcgtagagggctcggccaaacaccttgtgcgggggcagctgccgaaacaaatgttctgacagcatctcctcggcgttaggaagagcgatgccacaagtgccaatgatgaggatgtcggcgctcaggtcggcgggaggaaggtccgggtcaaagatggccgaagctagggaggccgagttctcgatgtcagcgaacacggcaatcctgtcagcgatcgcggtggcctcgggaaggtcgcactcctcggccaggtggcgggccaaacgcccacacgaggtgatctggtggtcacgcatgtaggccggtttgaggaccttggccagcgtggtcccggccacaccgatggtctccaagttaagcaaggtcagcaagaacgactgggcgacctgcccggccatctccgggggaaggatgcgcagcgggtccagcgacagcttggggtgggccgtgtcgacgatctggcgtctaaccccgtcgatagagttgacaaaggttacccactcccgctcatcggagttgtcggtggcaataatgcgcccgccccgggccgcgatggctgcgcacagccgcttctcggccatcgtcttgcccgcgcccatcttgccgatgaacgccaccgtgttgcctttctgatcctgagtgtcggcatgcaaatcgaggtaggccagcgactgcaacggggagcctgtgaccacagccaacgggatgccggtggtacggcccaaccggtactcgaccaccgggatagatgcggcgaacgcggaggcgtgagtcagctgacggtaggcgttaagcgaggaggagaaccggccaccgggccgggcagcccacagcaagtcctcctgacggcccacgggacgcacccacgtgaagtcaccgaacaccggatcattgacgaacgctcctgccagctcctcggtggtctcaaagtcaggagacgagacagtgacggtgataagagcctggatctcgacctcacgctcatcggcggccagctcggcgttgtagtcgacgagcacctgagcggaatgctcgatagacatgagggtcgaagcctgggtcatctcaccgccctcaacattgtcgagctggtcgacggtttggcggatggcccgctgatttttctgcatcgcagcgtgacgggtccgggccactccccggatcgccacgtcgaccggcacgccagtgtcgtcgatacggcccaggaactcgtaggcaggccacgtcatcgtgcggggcaccttacccagcacgatatgggactggtagacggtctcgccggtgtcggcaccgattttgaggacgcgacgattccacgcctgagccgtccgggacatgtgggagactcgcttgtcatcctcgctggccagcaggtcggaggtcgcggcctcatcgatgaccaactcccccagcgcggcacgtccaacctcatccatgagggcgattccctcgccaggggcatcatcacgcaaccgggtcgggtggcctgacaggtgctgccgaagccagatctgttcatcaacggtgaccgggcggggttggaacgctgccggcagtttcgcaccgaattccttagcctgacggagggcccactcccgtgcgacacggccaggagcggtggtcataagtccggcggcttcggtgattttgttgagggcggcggtccaggcggtgtgggtgcgtattttctggtcttggttgagtttgatcgataggaaccacacgcgccggcctagggatgcggtttcaggctggtcgagggtggcgtcgatttcgtcggcccacacggggtgttcgctcaggtcgaggccggcggccatggcgtcgacgatttctgtggggtcggtccaggtgagggctccgttgaggcagaactcgtggcgggcgaggtggcggaataggtcgcggtgagctgcggcgacggtgagggaggcgttctcggtgacgggtcgctggaggggagtaagtcgccaggtggcccagatgtcgccggtggaggtccagacgaggttgtcgaagaggaaccgttcggggatggacatcatgactccttttcggcggcggcgaggaaggcttccaggccgctgcggcgtacagcgttcccggtagggtgcaggggttttctgggggtgggttcagatttcgaatgtgggaggggtttgtggatggtatcggtgtcctcggcgagggcttggtcgagcaggcaggtggccggggtgtcggtagtctcgtccagctcgtcgatcatctcgtcgaggaggttgggggtggtggatgcggcccacacaggtgggatagccggtgcgggtcgaggcggtgtggggaggcggagtttggtttggccccagaggggtgtgtgggtcatgccggcgggagtggtggcggcgtgagtggtcacacgccaccagcccgacagccatgccagaggtgaccaggtccagtcgatgcgaccaacaacgaactgggcgaaccatccggcagccagcgcgaaaatgaaaccgcggatggtcatgcccccgtcgataattttgaagcccatcatcgcggcaggaactacgccgccgacagcgagcacctgatagatcgtgtagggcccgccaggaatccttcgacctgaggaatccttgccgataatgcggggctgctggcgggcctcggtgtgccactgaatatccacgatcagctcttgcccaatccttgcatcatctgtccgaagaattggatcgcgttaccttcgataagccagtgcgccataccacacacaaacagcatggagacgatcttggccaggctcataccgtgtttgaagatgttgaacgcggcaatgcccacgactacgaccatggcgacggctcgcaccgcggactgaccttcacctgccttgatcgtcgtccattcgaagaggttctgcgattccagtggcagcaggaggaattgatcgagcatgagaggttttcctttcaggaagccgaccgggatggtcccggtactgacgggctggacggcacgggtgtgccggccaggggcagaaggcgtgacggctggtcgagggcggcaacctcccagcggcctgcacggctgacaagagtcaggccgtactggctagtccgggtagtggattcgtcaccggtgggctggcatgtcacggtcaccgtgacggtaatcttctgccggtctgaggggggggggacctcgtcaggtcccaccacatgagtggttttcactgatacgcatggggctgggtcaaccgcggtgaaagcggtccctgggctactccatctcgacaggtcgtcgctgccactcagcatcgcggccaagaaacccgaagaggtctgggcagccgggtcagcaggacgaatctccgaggagtccacgtcgggggctgaggccggtgcaggcatggggatctgtccaggtagacgcaaggcgatggccttgccgttggaatcgacgtggaccgggactgaccaggcctgtccgctcccggattggccgcccatggtgaccacggtgacctgccacaggctcggatcagacggggagacggtagcgtcataggcggtgacggtggtgggcgctggaccaggtttgcggggcatgcgcgcatcggtgatcttggccgccaccaggtgttccagattgtccaagtgcccggagtcagaggtcagcagaagagtagtcacctcgaccgcggtggctgaggcgatctgagctgtgcggcggtcgtgatgggtggtgtcagtgctgacagctgtggtgggagcggatgccggggccgccgaacggaccagggcaacggggccgcatgcgactccgcacagcacgagggcaaggaagcctttggtggccatcgatccggtgtggggccagggacccacgttttcctgtgcctgttttttcttggccgaccaacggcgggacttagggttagcggatgcaccttctggggtgcatgctcgtctcaatcgcatcggtcacctccttcactggatgaagggaccaaggaggtgaccgatgtgcggtcgaacccgaaaaagttcaaacttttttctgggtctgcctcaagtacgacagaaggcctgcatcatcacggcgttgtggtagcagatcttgcgtcagcgcaaatgcatgggcctcgtaggagtagctcttaggtaggtcccggtggttgcggccagggcgagggtgtcgggtatgtgtagcgctagtcccgggttcgtggtgtgagggcttttgggtgctgacatgcactacccattgctagacgctgtgctgtggcatggctggacgtctagcagacgggttgacatcacctttaggctggcagcgcccgaggccgcaggccagaggaagcggacagcctaacgattgacgtccccctctcctttccccaacctcctggagtcgatgacccggagatagatcgatgtctatgcatcggtgcatcgatatacctatgtatctgtctgtggtttttagaggccactcccgtcgccccgggccgctcagcgataccgcaaggctgtgtgggatcagctgtgccgctcccccgacatggcagacagcaccgttgcatgagaactgactgacactgtggcgccgcggaggtctcccgcggcgtccgctggggcgagtgcatgcctgtcagctcatcttttatcgtcatgtttccccttgtcagagcggtctttgcaaagtgacaacgtcaggggtcttgacgacaacatcctcgacaacatcgtggcggtggtctgtgtctcgtcagttcaacgcaccggggaaagaggcaccgctgatgttcaccaccacaaacaccctcaacgatgaatgggaccagattcgcgccactgagatcgattggcatgactgccctgaactgatgcactgcatcgacgttgatgatgtgttggccgtcattcctgccgcccccgacgccatcttgggctacctcattgcccgggctcagggcggtgacgagttggccacccgcactatcatccaagcgttcacaggcaagcttattttgatggccacggccaccaaggtgcgccgtactaatgacggcttcaatgatctgttggcgggtctgtgggagacgatcatcacgtacccgttagatcgtcgccctgacaagatcgctgcgaacctcatcctcgacacgttgcaccgggttacccggttttggcgtgctgattcccccgatgaggaagaggctcacggtctggtgcccttccctgacactctcatcgccccagagcccgatgaggacgtcacagctagccaggccatcgccttggcggtggaccgcaactggattaccgaggacctagcccgcctcatgagccatatttactgtgacggtatgactggagctgatgcgggtcgtctgcatggctgcgctccagctacggtgcgatctcgatgccgtgatggtcgggccgtgttgcagcgcaacgccgagacgatcctggccgtctgctgatccctctcttgctcatgcctgccgccaccctacccctacctgctagaaacatagccatgtctccagcaacgcatctagcatatcttctagcaattgatctagctatcatatagctgatgatctagctatcatatagctgtgtctccagcccaaaggacagcccaatggcatgcttgccacaggaaggtgcgtcagcctcccgaaatactggaaggagctttagcgtgcaggacatgaccagtcctattgaccgatccccgttcgaccgcactattgcggtgtggaaccacaaaggcggcacgttcaagacgtccgtcgtggcgaacctgggatacctgttcgccgccgggggcaacaaggtgttgatggtcgacatggatccccaggccaatctcgacattgacttcggtatacccgcgggagaacgtgaacggggcatgggattagccgaggcgctacgtgaggggactgtccttcccccaccgcagcatctcagcgaaaaccttcacctggtcagtggcggcgctgctctcaacgagttcaccgaccccgcatccttagcggccatcctcgaccgagtcaccaccgcacgctacgacctgctagctcaggcccttgccccgctggcctgggactatgacctcatcttcatcgactccgggccggcccaaactctgctgtcccagaccatccttggagtagcccgctggctggtagtgcccacccgcaccgataacgcctcaatcactggcctcgtcgacgttcaagacgccatcgacggggttgcctcctgcaaccctgaccttcaactactcggcgttgtcctagccggcgtgggggcccgggccacccggatcgccgcagataaacgccacgccatcgacacagtgctgggggcaggaaccgttttcgatgcggtcatccactactccgagaaggtgtccgtgctcgcacgccagcagggcaagaccgtcgccgagctagccaacgagtaccacaacacccagcccgcctacacctacctagctaaaggccagaacatccccaacgtcgccaaggcagccgtcagcatcgaaactgattatctgaggctggccaccgagatcagcgaccgcatgttcaccagcgacgagcaggagcctgatcatgactgacgatccgactccatccgagcagaacaaccccaccagcgacgacatgcgcttggccgaagaatgggccaacagcggccgcacagtgggagccctgccgcgccgtcaacggcctcagcgacccacaccccgcaccaccagccaacctcctgtctcgtcccctgacacaccggctccgaaaaaagcccagaagacccccaccagccagcctggccgtcaacggatcaacgtcaccgtctacgttgtgcccgaactccatgagcggctgcgctcccgatcggcggcgacgggggtgacggtctcggatctggtggtgcatgcgttagcgttcgtcgccgatcatgcgggggaggcgatcgccgatgatctgcgcgtcgagacgggccccggcatgggggccggactgttcgatgtgaccccatcgcggccagtaggggtcgccaaaacccagctgggggtgcgaatgacccgccacaacaaggatggtttggaccagctgacccggacgagtggggcccgtgaccgcagccatcttgtgtctgtcgccgtgcgcgactatctcgactccaaccctgtaaagaaaggccgacatgtccgctgatgaaactcctgccgcccggggtgggcgacgctttgatacgaccgtcaagcccaggcgccgtcccatgcttatcgccgccggtatcgccatcgtgatagtcggcgcgctcctcatcactcagttgattcgctccgcccaaaccgagcatcgcgtgctggaagtccacgccgatgtggctcgcggcgaggtcatccgtgacaccgatctggtatcggtgactgtcggccaggtcgacaacgtatcaacggttcccgcagaccagctcgactcactggtcggcaaacgcgccacggcagatcttcgagccggatcactcttgcctgctggggctatcggcccggccgatgtcgttccagctccgggcaagtcgctggtcgggctgaagctagccgccggacagatccctatcggagaccttgctgccgggacgaagctgcgcctgatccagacgtcggcacccagcggctcatccaccaccactgatagcagcaccaataccgatggccagtcgtgggaggcaacaatggcgaccggcaccaaaaagaccgagcaggtcaccttgatcaacgccgaagtgaactcgcgtgatgccgcccggatcgcccaactgacgtcacagggccgtatcgccgtagtgaaggatccgatccgatgagcaccattgttttgaccagcgtctcgggagccccaggggtcaccacgacagcgatcgggctgggcagggtctggccacaatcgagcctggtcgtcgaggatgacacccaccacgccatgctggcgggctacctgcgagcctcccagcacgccgaaccgaacctggccgcagtggcgaacctgacgtcgactccaaccaacgcccaaacggtgtgggaatctatcgccagacccctacccaccgatgacccagtcggcgggctgcgacgcaaaggcatcctcggcccgcccacgccgtggtctcgcgcaggcatcgacccccgatggggattcatgctggccctgtggcggcaactggaggaggctggcatcgacaccatcatcgatttgggtcgcctagccacaccactgacctcaacgccacacctgatcgccgcacccatcgtcgaggacgccgacatgatcttggtgatgatcgaggcgacactacgcgacatcgccggcgcccgcacgatggtggagggactcgctgagcagatgaacttggccggcgcctaccgacgtctcggactgcttgtccaccgtggcggccaggcccgcggcgtcgccgagttcaatgacaaggagatcacctcggcgttacgactcccggtcatcggggccattacccatgacccggccggagccgcccaactctccgacggggtcgggcagcggttcgacaagtcacgtctggcccactcactatcaaaggtggcggccagcctcgtcgatgccataaacaagcgccacgctgatgacgaggaggatctgtgatggccagttttgctgataatccgttcgacaagctgcgctcccaggatgcggcaagagcttcggtagagcaggagcctgatgccggattagcgtcggagttgttttcgacgtcgtcggggtgggccagctctcagcaggtgtcccaagctcaaccggtgatgacccgttcggagaacgtggattggccggttgtcgcggagctagccagtacggccactgatgaggttgaggctgagatcagccggtggagttccactcatgatggggtggcgacgctagacattcgccaggccatcgcggagcctgctattgcctcggcggtgtctacgtatgctgaccgacgccagatcgatgtaggggagacctggcctgatctggtacgccagcgataccgcaaggctgtgtgggatcagctgttcgggatggggcggttgcagccgctgttcgaaatcagcgacgccgaaaacatcatcgtggtgggtaaccatgaggtggttgtcgaccacaacgatggttcccggtcaacgctgccgccggtggccgactcggatgccgagctggaatcccagatcgcccggatggcgaggaatgcgaccccgcggcgagccttcgacgccgatcacaccgatgtgacgatcatgcaccaacagaagttccgtatccacgcgatctcagcggaagtgtcattgcaaccgtcggtggtcatccgccaacatttgctcacccaaatcagtctgggggacctgtcacatcgcggaatgatgccggtggaagtggcccggttcctcgatgaggcggtacaagctggcaagtccatcgtggtcgccggcgagcagggtgcaggcaagacgacgtttttacgagcgttgatccacgccattccgatgcgggagcggttcgccacgttggagaccgatcaggagttgttcgctcatctgatgcctggccgggaaaacacgctggtgctgttcgcccgtgatggtaacggcgaggtggatccggcgactggcacccagcacggcgctatcgagatcgcccagctgattcctcctagcctgcgccaggcgttaactagggtcattgtcggtgaggtgcgcggcaatgaggcctcggccatgttccaggccatgcagtcgggtacaggcaccatgagcagtatccactccccgcgagcctctgaggtgccgtcccggctagcccaaatgatttcgatgggcccggtctacgatctggatcaggccatgctgcagatcggtcattcgatcgactacatcgtctttgttcgtaagcgtgacctgcctgatgggagccggctgcgatttgttgagcagatccgttcagtctcgcctggtgattcgacaactcccagtcttggcgaggtgtacacggctgactcgtggacaggccagccgcttacgccactcatgcctggttcggccgccgatgagctgtctcatttcgcccgagacctggattactgcgaggcccactcatgaacactcccgcactaaccagcgccctcatcgtgaccgggctagggctgatcctgaccatcgacgggctggtcccggcgccgcctcgacctggtgccccgctgagcccggcccaaaggtgggctcggctcacccaccgtcccactggtgcggccgggcgtcgccgggatttgcgttgggggttggctgttcttgtcggtgtcgtgttgtttgtgctcaccgggtgggtggctgcgctggcgctgggccccatcattgtgttgttggcccccaccctgctgggggcggccccaccgaccgatattccgctgatggaggcgctggatcggtgggtgcgtcaggtggctgcggtgctgccacaggggcgagacatcatcacagcggtgcggatctcacggccgcgggccccgaagctgatcgccgggtcggtggatcaactggtgtcccggttggatggccgtatggagccgagggaggcgttccagcggatggccgacgagctggactcggctgaggctgacgcggtgctggcctctctggcgttggcggccactcatccgcggggagcctcgacaacgttgaaggctattgctggcaacatccaacagcggttgaaagtgctgcggcaggtggaggctgagcggtctaagccgcgtaactcggtgcgccagatcacactggtcacgatcgccatgttcggggggctgctcgtgatcggacggtcgtttctggccccgctggcgacccctcccggtcaggtgctggtggccgtggcggtggtcatgtatgtcatcgcactagtgcagatgtatcggatggcgcggccccgtcgacgcacccggatcatggtcaggaggacccgatgaccattactgctttgtccctgctagccggggccatcgtcactgtcggactgctggtcatcgtggcagcattccgcccagccccaggccctgacctggttgccgctctggaggtggtgtcgggtcgcacctcaagcgtcgccgagaacgtcgaccagacccggatcgggcggataggtcgcagcgtgacccgcacattccatgtgtcggtgtccccggccatgcgggccgcactgcgactccaaggcacgacccccgaagcgttctacggtcgacgcctgatctgcgcactgatcggggcgatcctgccgtggctgctcaacgcggtagccatcgcggtaggggcgaattccccgaacctactcatcccttcggcgctgtgtgtggcgttagctggcgctggatggatgctgccggcagcacggttgaaggctgcggccgggcccaccaacgatgactcgttcgaagcgctgctggtattcatcgatttggtcgtgctggaacggctcgccaacgaaacctccgtcgacgcgctcaccaatgcggcaaacatgtcggactcgccgctattcgtccagatccgtcaagtcctcaaccgtgcctccctggaaaacgtcgacccgtggaacgggctagaccggctagccgaggacatcaaactgcccgaactcaccgatgtggtctccatcgcccgcctccaaaacgaaggcgcctccctcgtcgacagtttccgggcccgagtcgccgagttacgcgacgcctacctgctgcgcctgcaacaagaatccaccacgatcacccagcggcttggtttgtggacgatcctgcaagccggctcggtcatgctcatcttgctgggggcggccgccctcacactcatcacagccggataaaccgacaccgtgtcgagcccccatatgggccgcgaacctttcataatgatgcctgtaagcaccacaatattgatcacaacctaacaatgaaggagaaatcatgatgaccgatctcgacctggctaaaaaacagatcacctggctggcggcgcacctgcgttcccggatcgttgacgagcgtggcggtggtagctctaccgtggagacactgatttggattggtgtcatcgtggcgctggtgattggtgtgggcgtcggggtgacggcctatatcaggtcgaagatgcctcactgacgacgatgcgtagcaggttcacaactgatcagcgtggcggtggtagcgcgtcgatggggatgctcctgctgatgcctgcgatcatgctgctggcattcggtgggatcgaggtcgggatgtggtgtcacgcccatcagtcgaccatcgcggcagcccaaagcgccgcggaggctcagcgtgtcgtccatccagctccggggtcggcacaggaggcagcctcgcagatcactagtcatggcggggtgcgtgatacccggatatcggtcagtgatgacggggccactgtcacggtgaccgtggtgggccgggccccatcgatgctggggctgcatcttccggctgtgtcgtcgacagcgtcgatgcccaaggagcgcctgtcgtgaggcgaagtgagcgcggcggagcaagtctaagcgtcgaggtgctcatgtgggcgccgatcgcgctggtgatcatcgggtttgttgtgggtatcggccggatgtcgatggcccaggacgcggtgagtggcgcggctggtgctgcggcccgtgcggcgtcgttggagcgtgatggacagtcggctcagtctgcggcgcagcaggcggcgtcggcgaacctgtcgtccggtgggctggcatgtgcgccgagtgtgagcgtggacacgtcagtgtttgcccgtcctgccgggcaggcgggcacggttcacgccacggtcacgtgtgtcacctcgctgggtcttggattcgggtcccggacggtgcacgcaacggggtctgccccggtagacacctatcgggaaaggagaggctgagatggcccgcgatgagcgtggtggcggctcggtgtcggtgtggatgctgctcatggtgccagtaattctggtcatggccggcctggtttttgacgggtcccgtcagatatcggcaacccaggcggcccaggacgcggcggttgcggcatcccgcgccggaactgatgcggcagcgacaccgcagctagctggccacgacggggcggccgtagcagtccaagcggcccgccaggcactatctgctgccggggtggacgggtcggtgcaggaggacgggtcgaccatcacggtgaccacgtctcaaagtcggccgacagtgttcctgtcagcgatcggaatcagccaggtgaccgggcatgggcaggcccatgctcagcttgtgggaccgggagaacgcccatgacagtgatacgtcgtatcggtgccctggtggcactgctggtggtgatagccggcttaccggccgggctcgtggccgcaggcgccccgctagtaccctcgggcctgtcatgggcccatgtgcggcatctgttggttaccccagacatgaccgggtcggtgctggtgtggctggtcagcctcatcggctggatcgggtgggcatggttcgccctggccgtcgcagccgaagcggtgacgatgctctcagggcagcggctgcactggcacatgcccggccctcgcctagtgcgccgagtggcagccggtctcctcattgccgcgttcgcgggcgcaccggcggccacgtcggcagctcacgcggtcgaggccacccatgtggcggtcgcagctcaggcttccccggcccacgcggccggcacccaggacagccccgccaccacctctcaggccccggacgcctccaccactccgaaaatctggaagacctacacggtgcgggccaacgactacctgtggaagatcgccgagcactactacggtgacg

SEQ ID NO: 190 - DNA, 13200 bp, Propionibacterium acnes
  source 1..13200: mol_type = genomic DNA
aacaacaccgaaccgttccaacccgccctgttcgagctggccgactgcgcatgaggaccctgcacagacgtgattaaatcgaagggctcaaccagtcatcaggagtcccccgtgcgtttgtaccgcgctgttctcgccgacaccgacatccatatcaccatccgtatctggaacactaccgatcgtgactggacctgggccccccttgacacttgggcccccgacccggccccgaccacaccagcccagttagccgatgaacttcaccgtcacggatggatcacccctgaggtccctactaccctcaccgaggtggctgtcatccccgagaactggcaagctttcgtcgagcatgccctcgctgtccggaaccagcaggctgaccaattgcgcgtcgccgagaacatcctcaccgacatcctcggcgacgccgccgacgccggcctgtctgtcaccgctctcgcccgcacgaccggactatcccgagtcgccgtctacaaacgcagcgccaaaaccatcgactccatgagacacgccacccaggccggcggaatcctcaccccctcctgtctcacccacgctgagagaacagcgctcggcctgcccgacgagtaacccatcgtttacatcctcgactggtccctgcgaccagtgaaccgtgcccccactgcgcccacaatgatcagcacacccacggcgatcatcaggtgggcagcactaactgatcccaacgaaccaagatcaaacaagccctgcccgggagcgtcgagcagtccgtgggcgcgaagccatgctccgagattgccaatgatcttggggatcatcttgttcagtagggctatccctccgatgccgacaacgaggaagacgaggatttcttcgcctgcgttgtttcttcctgtgtttgcggtcatgctgccttctcggggtggatggccagccagctgatgaggttgtcggtgatctgccctgagatttggatcagttcgacttgcccggcctgccatgcccgcgatgtgccggccagcaatgatgctgggacccctactgcgcggccacgggatgcaacctcagccaaggcggcgcgtaactcctcgacggtgctttcgatgtaccaactgccgtcagtactagtctcagcggcatcggtggtagcgataagagcatcggtgaggtcgtcgacggcgcggtccagatcagcgatgtccggtagggctacaggagtcatggtgtgtcttccttctagggtgccttcactggtgaagggtccctagccccggccgatgtgcggtgctgtgggaaaaatgcttcccattggtccgtcttagttaggaaacttggcctaagtgctgtcgagggtcgcgtgttcgtgaccggttcgaagacactgccgccttgtcttcttgcccgtggcgcttccgagatggtcagtgggcgatggctaggccgatgagggcgccgctgcacaggctgggcgcccagggaaggaatcgggtggtgtggtgtcggaaccggtcgattagggcatatagggcgatcagggtgaggccggctatgacagtgacctggatcgtgtcgatgccggttgctgcggccggggctgcccacagtggtgtgatgcgcacatcagagaaaccgaatccgcctcgggagatgagccaggcgatcatccacgctgcgaagatgatggcggtagcgatgacagcacgtatcgccgcagtatggtccgagagggcggtaacgactacagccccgatccatccggcccatccggtccacgctaggactgccggtatccatgtggtgatggcgtcaatgacggcaacccatgccccgatggtggctagcagagcccaggccggccaggtgggtgctggggcccacgctacggcggcgatcatggttgtcgcagatgcagcacagacagcgatcaagcttcggaggctgtaggtgtcgcggtagacgatcttgtcgggattggcggtagctggttctggcaggacgcgggtgagggcaggccatcctgcgaccgcaatagccgcgacggcgaccacccacacaatctgttgcatgggtctcatcatggcccatcatcgatgagtatgggtggccgacatggggtcactcgtagaggggatcgaggggtgtgcgggcgagcatggcttcctgtgtgccgagcatgagggtgccagaatcctcgccagccgattcccagtcgacgatgacctggtcgccgtcaacgctggattcggcgatggtcacccattctccgtcgatattgatgagcaccccagcggccagctccgtggcagcaaccgggtgaggtgggttgtagaagcggtcgatgtcgcaggcagggtcgtcgggttcctcgactaccggaggtggggtcgatctggctgtctcggtgtcgtcggccaggtcggctcccaggatgcgctcccattcggggctggttttcttgcccgctgaggccatcgtctcgtcgatctgttcgtcagtgggccacacaaatttctttttggtccaggtcgtggtgtcgggtcgcagctgatccagcagttccaggtcttgcggggagtgggccttgcgggggtcgggggtgtagaagaattggacttccttgggggctgattcgccggataggtaggtgccgcggccgcgtttgccgaacgggatgcccacgccgacgtgttcggagccgaacatcatgcgggctccgtcagcggacaggggtccggtggcggcacgcccggagaagttgtctcggatttcgccgcccaggaactcggcgtcggggcgttgggtccccagatcgacgtggatacggcaggcggctgccatgcgcagcagggagccgatccagccgaaaacggggcattctccgggcatcccagagaccttgatcgttgaccaccagtttttcgcgttgccgtagaactggcggtactcgtcgatgaggaccagcacgcgggtgaagtcggtctcgcgggccccttcttcttcgatgcggcggtagcggtcctccatgagagaccacagccagtggatgagggcgacctggtcggggacggtagtggcgaccatctcgatgttgggccactcccgcaggcccaggtactcgatgcgtttagggtcgatgacgaagacgcgccagttgcggcgggcaccctcgacggcgtcgccgatcatggacaccgtttttccggtacgggtgcggccggccttgagctggtgggccatgacaccggagatgtcccagaaacaggtgttgccgtcctcgtcgacggcctgggggattttctcccagtctggggagtctgggcccggaagggccacgggtcggggcaccatcgagggcagggggtggcggcgggtgacggtgatggtgtcgtgttccaggtcgaagtcgctgcgccactggccgagcatcatcgccgaggtcaccgcggccaggcgcaattggatgttcgggctggacaaatgggcgccacgttggtggtgaatggtgaagccgtccaggttcccccgatcggttttccaggaatcgacggtgaccgccgacccatagatctgagtggctacttctttagcccgttccttgtctcggtccagatcggttttgtcagggtcaggggtcggggcgcggtattgcaggacgaaccggccggccgggatcgttgcggatgtcaccgtgaactctgccggcgaccaggcagccgcggccgcctgggtgagggccattggcatggtctcgacggcagcctcctcgggggggatggtgagggtcaggcgtcgcggatgcgtcttcttgcgattccatgtgactttctgcctcaccggcaccttcgccgccgactgaatggctaggcgagctgattcggcagtttcggtacgccggccagcgcgtagcgcccgtcgtgcgtgaaggctgcccaccacagcacagcccatacacggcagccacgagcgcggatcagcggctgctgcatagcccccggtagctagtaccgcacctgaccagccggccgcgatacttttccacgccggtttcgcgccaccaggaccagcgttatggacggtctgcttcgaggctgcggagggacgagacagcggagtgctggtcatgccgcggcctccttgtggcaggtcatttcacaggcatgccggccagcgatgatgccgtggcgcaccgccccggtagccgcatagaccgcgcacaactcaaacacggggcacccatcgcaggccgccgggttcatgctttctttgtcccacgatggtgggtcatcggtgcacggcacggccaggccatcctgttgagcggcgctgatagcggtgaataggcgcagctgggcgcgaacttggtctggggtcaggttgacggtgcgggctacacgcatggggttccttcctcttcaccagtgaaggttccctagacccggccgatgtgcggagggatttcagtgttttatcgaggtgaccagccagccggtctgcgctgcgggttcaggtaccagggtcagatgcagcatggtgtggtcggctaggggcacggcgaccaggggcccgtcggcgctcgccccggtgagggtgggagttccggccacggtggtggcgggaatctggttgggtttcgcggccatcagggagcccatgagggtcggggcggcgatctggacgagggcgactttgcgggcggcgggatcgcgggtcaaccagccgcgggtgaaggtgagcgcagccgacgtgatatcggggctcagcggggctggtgtggcggcggggtgggccgttgaggagggccatacgcgcggtagcgctggcgacatcgagcgggtcggagtggggtcaggtgtggggcttagggtccgatgtggcgatggggctaccgccccggtggtgggagacgagactggttgggggtggtgttgagggcgtgggatcagggtgaaggcagccaaactggccgggatgaggatgacggccgcgccgacacttcggagcgaggtcatgtgacgatccttcggtagctcgacgggttgccgtagatcttttccacgttgatgccactatgtgggttgtcggcgctaaccatttggcctccaccgatgtagacggccacgtggtgggcagggcttccccagaggatgaggtcgccgactttgagctggtcacgggccaccgcggtgccgactttctgctggtcggcggcggtgcggggaaggctaatgccgatacgccggtacagcgccgaggtcaggcctgagcagtcgtagccgccatcggctttgccgttgccaccccacacgtaggcgtaggagttgttgtcggcgatcgatttggcccatgccacggcttcggccaggttcttcgacacaccggtctcgttagcggccccggtggcacagttgtttgacaggtgccctgtagtagtggatcccactatttgtttggccatggtttcccatttggcgtaggcatcgggcagggctgagccttgcactgcctgagctgcctgcgtcagcggcatcttctgccagtcagcgatgtcgactaaaccgggaatgtggaatccagggccgccggccgatccggggccagcgtaggtgatggtgtggcctttcaagaacgcctcggtggcgtaggcatcattgttgacctgatccagagtcccgtaccagcccggcaggatgcgctgctgaaaggggccggcgtcaccgtcaccgttagccttcgctgaggtagggtcggccccaagatctgattcttgtttggcggtcataatagcgatgaccgctgcctgggtaggcagtttgtcacgctggaccacagtgacgatggtggtcacgagctgcttctgcctggccgtgaggcctccggcacccacagtgcctccggtgacggtacccacgcaagcatccccgccgacactgccaccgccgacgccagagttgtcgtcgagggccccagagcctactgacagcagcggcacaatgatcacggtcgcgggcaagaccgccaggcccgccagcatcagcactgctgcactcaccacggcgatcacgtgagatgctttcaacgctgcccacctttcgctggtttgagggggcgacgcctgctggtacgcacaggcttggttggtccagtccgccgttggttggcaggcctgggtttgatcggcttgctgggacccggtttgggctccggagtcttaggctccggcttcacatgcctaggcacttcggctgcggtgggaggagtcagcacgtggcgtaccggcttggtgaccttctgggcacccgaaacaaccggcttagacaccaccttggcacctttgaccaccggtgcggctgccttcgcgccggccttcttgactgcacgatgcgctttgatagccccggcctcggcccggccaaccctgctagcagtagcatcgagggctctgtggcccgtcgttgccctcaccggtgcatccttgccctggcgggtctgcttagcgatcgccgacatgccgcctcgcaatgccgaaacatgattgtgggcgtgggcgatcgccgacatgccggccgtcgcgatttttgactggccctgcggggcccctgccccagcacgaatctgctggtaagccgccgacgtgccacgagcacccgccgccattcgcgccaccttcgcagccctagtcactcccgtcgacacgccacccgtggctaccgcagcagcacccgagaccacagtcgaggccatccgccttcgacccaatccggtgagcttgcgaccaccgctgcgcaccatccggcgagcaccccgcccagcccactggccgatcaccgagcccctttcggaacgcttgctgcgcatccaatcgttgatcttgtccctcagccccttctcgcccttgtgacgacgccacatggacatcaagaacccgataatccccacgagctcgagcatgttgacaaccatgaccttgatggcgacatcaccgtcagaggcgaaaaccgacttgatgatgagcatgaccacacccaacatcaccatcgacccgacaatgccgatcatcgagtacaagatcgaacacagatcccggatgagcggatctgtgcggccagggatagcccgcaacacgttgagcatcgacatgaacgccgaccacaccaacttgcacacgtagaaccagcacatgcccgcgaacaccagcaggaccacagccaaacccgccaccgtcgacgagtaaaagaagaaccccaccaaccacgaaccatccgcaatatcgccggcgtaatccgacaacccctcatcacagtcaccaaggtcgtcgcgagcatccgagacgtcatcgtaagggccacccttgagcacctcgatgtacttgtcgtggcacttcgcatcaataatgcggccatagttgagctgctgatgaaccggcgccacgaacgagtccacaatgatcgccgacagcttcggatccttcgagtctcccgtcgaggtcatgtcatcaggaatctcgacctcaccagcggtcgccgtcgcaggatcaaccgaactggtaatcatatgagacagcgccacaccgaactgctgggtgcgagccagcggagtagccaacgtcgtcgtatcgcctgcgaacttcgccaccggggccgccaagaaacccaacgccagcgccgcagcaatcgccgcacgcgcacccgtagcccacgcccctgccgtacgtcccctcatcatcttgacgaccacgcccacaccggcgcacgtcgtcagcaacgtcaacaccgttccaccccagctgtccgctcccagcggggccaaaaccttgtcgtggatgtcgttctgtaaccccaccagcggtccggtaatccacccgacccagctcatcgccacggtccagtccaacaaccggcacaacagggcaatgaccatcaggtacgtgttccaacacatgccaataatggaggcccacatagccttcagcggggccgtaacgccaccatcgtccatcgacatctggtactgaaacaagtgaataccgttggagtcagtcacattgaaaccgtcacccatccagcccagccccgggcccgatgccatggcaggcacactgctcagcgccaccaccagaaccagcgtggtgacgatgatacggaaccgccgctccccggccccggggcggcgtggatgacggctcacgctgtctcctggtcgtgctcgggcgggttggagctggcggcttcgcggtggggagcgtaggcaggtctcagtagtcgaatttcaccgacgttgccgtgttggtcggcgtacaggccacaaccggggcctccggggttgagggcaatcttgaccaggtcagcgaactcttcaggggacgttttagggtccacgcccaggaactcgacacctttctgggcgaggttgatgttgtcgcacagcaacacgatgcgatgctgaatgaggttgcggacggtctcgttggggtaatcggcctcggggtcgtgggagccggtgataagccaggcattggctcggcgggattcgcgcacgtactcgtcaatggcgtgggaggcttccggcgaggacgacatgtgatgaaactcgtcaacaatgaaagcggcgtcgcgggcccggtcgctgaagcacaccaggcgagccagacgggcaatgagcgcgtagagggctcggccaaacaccttgtgcgggggcagctgccgaaacagatgttctgacagcatctcctcggcgttaggaagagcgatgccacaagtgccaatgatgaggatgtcggcactcaggtcggcgggaggaaggtccgggtcaaagatggccgaagctagggaggccgagttctcgatgtcagcgaacacggcaatcctgtcagcgatcgcggtggcctcgggaaggtcgcactcctcggccaggtggcgggccaaacgcccacacgaggtgatctggtggtcacgcatgtaggccggtttgaggaccttggccagcgtggtcccggccacaccgatggtctccaagttaagcaaggtcagcaagaacgactgggcgacctgcccggccatctccgggggaaggatgcgcagcgggtccagcgacagcttggggtgggccgtgtcgacgatctggcgtctaaccccgtcgatagagttgacaaaggttacccactcccgctcatcggagttgtcggtggcaataatgcgcccgccccgggccgcgatggctgcgcacagccgcttctcggccatcgtcttgcccgcgcccatcttgccgatgaacgccaccgtgttgcctttctgatcctgagtgtcggcatgcaaatcgaggtaggccagcgactgcaacggggagcctgtgaccacagccaacgggatgccggtggtacggcccaaccggtactcaaccaccgggatagatgcggcgaacgcggaggcgtgagtcagctgacggtaggcgttaagcgaggaggagaaccggccaccgggccgggcagcccacagcaagtcctcctgacggcccacgggacgcacccacgtgaagtcaccgaacaccggatcattgacgaacgctcctgccagctcctcggtggtctcaaagtcaggagacgagacagtgacggtgataagagcctggatctcgacctcacgctcatcggcggccagctcggcgttgtagtcgacgagcacctgagcggaatgctcgatagacatgagggtcgaagcctgggtcatctcaccgccctcgacgttgtcgagctgatcgaccgtttgacggatagcccgctgatttttctgcatcgcagcgtgacgggtccgggccactccccggatcgccacgtcgaccggcacgccagtgtcgtcgatacggcccaaaaactcgtaggcaggccacgtcatcgtgcggggcaccttacccagcacgatatgggactggtagacggtctcgccggtgtcggcaccgattttgaggacgcgacgattccacgcctgagccgtccgggacatgtgggagactcgcttgtcatcctcgctggccagcaggtcggaggtcgcggcctcatcgatgaccaactcccccagcgcggcacgtccaacctcatccatgagggcgattccctcgccaggggcatcatcacgcaaccgggtcgggtggcctgacaggtgctgccgaagccagatctgttcatcaacggtgaccgggcggggttggaacgctgccggcagtttcgcaccgaattccttagcctgacggagggcccactcccgtgcgacacggccaggagcggtggtcatgagtccggcggcttcggtgattttgttgagggcggcggtccaggcggtgtgggtgcgtattttctggtcttggttgagtttgatcgataggaaccacacgcgccggcctagggattcggtttcaggctggtcgagggtggcgtcgatttcgtcggcccacacggggtgttcgctcaggtcaaggccggcggccatggcgtcgacgatttctgtggggtcggtccaggtgagggctccgttgaggcagaactcgtggcgggcgaggtggcggaataggtcgcggtgagctgcggcgacggtgagggaggcgttctcggtgacgggtcgctggaggggagtgagtcgccaggtggcccagatgtcgccggtggaggtccagacgaggttgtcgaagaggaaccgttcggggatggacatcatgactccttttcggcggcggcgaggaaggcttccaggccgctgcggcgtacagcgttcccggtagggtgcaggggttttctgggggtgggttcagatttcgaatgtgggaggggtttgtggatggtatcggtgtcctcggcgagggcttggtcgagcaggcaggtggccggggtgtcggtagtctcgtccagctcgtcgatcatctcgtcgaggaggttgggggtggtggatgcggcccacacaggtgggatagccggtgcgggtcgaggcggtgtggggaggcggagtttggtttggccccagaggggtgtgtgggtcatgccggcgggagtggtggcggcgtgagtggtcacacgccaccagcccgccagccatgccagaggtgaccaggtccagtcgatgcgaccaacaacgaactgggcgagccatccggcagccagcgcgaaaatgaaaccgcggatggtcatgcccccgtcgataattttgaagcccatcatcgcggcaggaactacgccgccgacagcgagcacctgatagatcgtgtagggcccgccaggaatccttcgacctgaggaatccttaccgataatgcggggctgctggcgggcctcggtgtgccactgaatatccacgatcagctcttgcccaatccttgcatcatctgtccgaagaattggatcgcgttaccttcgataagccagtgcgccataccacacacaaacagcatggagacgatcttggccaggctcataccgtgtttgaagatgttgaacgcggcaatgcccacgactacgaccatggcgacggctcgcaccgcggactgaccttcacctgccttgatcgtcgtccattcgaagaggttctgcgattccagtggcagcaggaggaattgatcgagcatgagaggttttcctttcaggaagccgaccgggatggtcccggtactgacgggctggacggcacgggtgtgccggccaggggcagaaggcgtgacggctggtcgagggaggcaacctcccagcggcctgcacggctgacaagagtcaggccgtactggctggtccgggtagtggattcgtcgccggtgggctggcatgtcacggtcaccgtgacggtaatcttctgccggtctgagggggtggggacctcgtcaggtcccaccacatgagtggttttcactgatacgcatggggctgggtcaaccgcggtgaaagcggtccctgggctgctccatctcgacaggtcggtattcccggtcagcatggcggttaggaagcctgaagaggcttgggcggccgggtcggcggtgcgaagctccgaggtgtctagggtgggggctgaggccggtgcaggcatggggatctgtccaggtagacgcaaggcgatggccttgccgttggaatcgacgtggaccgggactgaccaggcctgtccgctcccggattggccgcccatggtgaccacggtgacctgccacaggctcggatcagacggggagacggtagcgtcataggcggtgacggtggtgggcgctggaccaggtttgcggggcatgcgcgcatcggtgatcttggccgccaccaggtgttccagattgtccaagtgcccggagtcagaggtcagcagaagagtagtcacctcgaccgcggtggctgaggcgatctgagctgtgcggcggtcgtgatgggtggtgtcagtgctgacagctgtggtgggagcggatgccggggccgccgaacggaccagggcaacggggccgcatgcgactccgcacagcacgagggcaaggaagcctttggtggccatcgatccggtgtggggccagggacccacgttttcctgtgcctgttttttcttggccgaccaacggcgggacttagggttagcggatgcaccttctggggtgcatgctcgtctcaatcgcatcggtcacctccttcactggatgaagggaccaaggaggtgaccgatgtgcggtcgaacccgaaaaagttcaaacttttttctgggtctgcctcaagtacgacagaaggcctgcatcatcacggcgttgtggtagcagatcttgcgtcagcgcaaatgtatgggcctcgtaggagtagctcttaggtgggtcccggtggttgcggccagggcgagggtgtcgggtatgtgtagcgctagtcccgggttcgtggtgtgagggcttttgggtgctgacatgcactacccattgctagacgctgtgctgtggcatggctggacgtctagcagacgggttgacatcacctttaggctggcagcgcccgaggccgcaggccagaggaagcggacagcctaacgattgacgtccccctctcctttccccaacctcctggagtcgatgacccggagatagatcgatgtctatgcatctgtgcatcgatatacctatgtatctgtctgtggtttttagaggccactcccgtcgccccgggccgctcagcgataccgcaaggctgtgtgggatcag

SEQ ID NO: 191 - DNA, 8556 bp, Propionibacterium acnes
  source 1..8556: mol_type = genomic DNA
tgacagcataacgggcctgcccttgaagggttggactctgcacccatttcagccgggtacgttgccggctgggcgaaggaagcagacggcgccgcgattgaagctgccgccgagcacgtcgcgaagacctcccacgcgattgccgaggcgttgcagctcaccgcacagtgagccccacggggcgaccggctcaccccggtcgcccctcaccccccgacaggggaaccgttcccgccgcctgaatctccatacccctgatacgtactacgcggggtcgaggagtggactcccccaccctcgtgtagtacactatactacacagtcattgaggatagaggtgacgtcatgagtttttcgatccgtttaaccgaccatgagcgccgcttagctgattcctacgcccgcctgcactcgcagtccctgagtgaggctttcaagcaagccctcttcgaccgcatcgccgacgagttcgatctgcaagtagcccgtgaggcactcaccgactacgcccgcgacaactaccagtctcgccccatcagcgagctatgggacgagtgtgacctatgagctggcagatcgaaaccacgagccggttcgataaagaattcaaaaagctagaccgctacacccaaaaactcattcacggctggatcacgaaaaacatcgacaacaccgacgatccccgccgccacggcaagcccctcaccggtgatctttccggactgtggcgctaccgcatcggcgactaccgcctcatctgcacactcaacgataaccgcctcaccatcctcgccctgtccatcggtcaccgccgcgacatctaccgataagccgttgcaagactgcggcgtcgacaccgccgggaccctggcccaggccttgggcctggaggaggacgagagcgaggagcacgccgcctgagcggtcgccggcacttcccataacagcaccggtcccggcggcccggccccgcgtctggtgctcggaccgatgccggcgcctggcctccgacgcccgccggggccagcggctgggctacctcgacgtcgacgtacaacgggccgaacgaaccgtgcgctgatttaccaccgcttccgcacagagaacatgcctctgactaggagaaatgacgttttccacagggcctctattactaatatccctattatctctatccacgcgcgcgagcctcagcgttcaagcttcaggtcttgctcgtctccctcgcgcctcgctgcgctcgttgctactgccgccccacccggcaagccgggtgggttgccatcggaataccgtggaccatcccggcgcatacacccagacggtccaagatccaatccacgctcacccgcgacgccgctaacgatcctcatacaccgtagatgccgttctgagagccttccagacccgcacgtgggtttattgcaccgagacccaaatcccctcagaagcgatcctgaaaccgtctacgccccatttccgacggacgctggacaggctgggcggcttgtctcccgccgcagacatggccctggcatatgcggttgccgactggtgggatcagggattggatcacacggcagacggctggtccaaggcgggtgtgcaggtgcggtgagcggcagacgtgaccggtggggtgcactgtcatggccgggcatctgccgagccaccatgcgggccctggaccaggaggcagcccgctgcgaggactgggggaagacggcggcacggatgggccgtcgggatgcggcggccgaattcaccgagactgcggtgcagcatcgtggacagatgcaccacctcatgtcggcacaaaaagtgtgggtgtcgaccgacatggtgtcggctacactggacgccgcaggagacgtgccgagtttcgaggccgtcgacgtccctgccgccgggctcatgggtttggccagccccctgccgccggttaccctgcagcatccgctgtatctgcgcagcgacgagggtgtgacaaccttcactgatccggttctcgtcgacgcgctgggatggtggatggattctgggcgtgtgcacgtggtgatgtgcacacgcacaccccggctgcccaacccggtttatgcggtggcctccccactgacggtggtggagaaaatcacggtgcccaccggcatcgagttcgagaccatggagtccaggatcctgacccccggcggcgtgacaggcgtctcacggcagggcacacgcatgatgatccggttggcgtcatggctgggtgccgcgtgggtgctcatggcgactccgacggtgtcggagccgcaccctatggatggccggtggggaggcccagcaacggggcagacccggccgcgtgatcgggtgaccgtggtcgacatgcggcccatgaggcaggtgcacaccaccaccgaccccaccggcaggcggttgacgacccggcatgtcgtgcgaggacactggacacaccaaccctacggcccggcccgcagtctccgacgcctgcagtgggtcgccccattcatccgcggccccgaaggggctccgttcgtcggcaccgacaccgtcaccgtatggcgccgctagatacgcgggcgcggggggttgacgaacgatgcccccctctttgtgttgtgatcagtcgtgatcggcgggttttaggtcggggtaggtgtcgagaatggccttgaggacgaggtcttggattgtggtgtcattctgggctgccttgaccttcagtccaacgccgatgtcccgggggattctggtctgcaacttgaacaggtctgcctccttggttttgaacagtttggctgcagggttggcaacgggctgttcttggcgctggcgtccaaggttgcttttctttcgggcggtcatgacatcatctccaacagttcgtcggcaacatcggcgaagaaggcgatagtttccggctcaggggtacagccgtaggcgcgcttgatgacttgacgcttggggatgacgtgatcgaccaactgcgtctgggagtcgttggctagaaggtcgcgaccttccttgaacagggaggtattcggttcagctttggaaagcagcaccacgcgcggggttcctgcggcggcgtcgtgcgtctcccaggtgcgcgccatgtcgagcccggacgtgtcggtggggatgataaccagatcggcggcgcgaatggcggcggtgatgatgtcaccgttgcccggcggggtgtcaatgatgacaacttcttcgggtccggcgacgaggtgctggagcgtcgccttgttggccggttccacggggaaccccaaggggtcggcgttactcagtgtgcactcggcccaggatgatgctgacccttgagggtcggcatctttgacgcggaccatacggcccgtctcatggagagctgcagccagcaggatcgctgccgtggtcttaccgacgccacccttggcgttgataatgctccagatcatggtgacacctttcagtgaggatgcatatcagtttacctgcaaggagtaaagacggcaagcagttatgccgtttctgcggcaagccgtcttgcatccttggatgtatagatagttgtctacttatggttgtggatcgtggtgtctcgtaccaggatttagtgtgctcgctgatatgcacgactttcgggcggcctgatctggcggtggtgccactaacccaggagtctgatccgcaaggtgtcctcgactttgaggaaggggtctctgctttcgtgttgacctaaagtcaacggccctgggcgatcactgaatcctaataactttgtatccttccctgattgcatcttagcatccttgaattcaaacagggatggagccatgctgttttgacgacatggatgcactggggtttggttgttgccgatgcggagcgtcaggcggcccgggacgccgccaccgccgacacgctgcgggagatcgtgggactgctgggccggggcggcgaggtcccgcccgccaagacggggcgtaagacgaccggcaggccggccccggcccgcaagtcgtcggccacgcagtaaaggcagggatccgtccctacgcagagagcggaggcagatcctgggggatccgactcttcggttccgtgatcttcccggagatcttcccggatcccccagggctcatcctgatacggggtccgccgacggaccccgtatcagtgggggcgctgccaccagtgatggcgggcgggtcggtcggcgtctaggccccgcccgatggtcgcctggtctacctcgcaggcccgtgctgttgccgaggccgagaacgtctgcccacttgttgccgattcagtcccctctccgtctgccatgtcgccaacctttcctatctggcgtgctcatggacatgcccgggcacgccctcgctgctcagaggcctgctcgttccacctctggccgcgaaccgtatttctgctgaccactcctcgtgcgtgaatatttgccagccttggccattcatatttggactactctgcaccagatatcggactgggaaacctcttgcacatctctaattgtcatctattcgttgggcgcgcgctgttagatcgtgatcataccaatcagaagacaaagcgacgcccttttgagcggcttttcgaacgattctagaccgcgctatatcagcatttctaccgcgcggccagagtgctacactaaattcctctctgcaatccttaagtccattctttacttcctcatccaatttctgcgacagcatttttatggaagcatcgcactctgactcatcatcaaatgcctcaattgcgtgcgttcgccattcacggcgcgtattatcgtagccgtaatgaagtattacccaccgatccacagaatcatcgttaggatctacaactgtcatgaatggcccaactctcgctctggtgtattctcaattgcagttcagtgactttacttgaccagtcccggatttagtagacgtagacggagagtaccccgccgggaacttgactgacatcactgctgtaccgtactgctttcccgggtggcaaccatcgtaagcagcatttgccgtgacgtacctagtgctctttctctgagtgccggtaatcgccttatatggtacaggtgggtgaatcgtagccgttacggctaccgatgacacgtttgcatcacatgaagctgtggcgacataattagttgtcccattgacatgatgagagtcgtggacatactgtcgaggatcgagagtgcaggttattgttgacgccgttgttctggtaccagctgctttcgagctctttgttgcagttacagtctgcggccctgaaggttttactgacgcgactgatgtgttcgcgtgttttgcggcagtgctttgatttggttgtgcttgtgtagcagttgctgatgtcgccagtgatgcccccattaccatagctgtgattatggcgtagtctttacgcttcattgcgcccccaaataagcatgttagtttgctattttgaataggaaacgagacatcgccatgacttgtcaagggcagaagtagaaagaatcggggggtatcaagaaagatgtgctttcatcaggacgaaagcggatgggtccgttcgacttggtgacgaatgatccggccttgcgtcgcggagaccaggccggcgagtttgtcgagcagggccgccgtggcctcatcgtcgggcacatcactaaagggacgaacaaccatgacggctagggccagaaacgaccggaactgaatcgcatgtggacccccatctggcaccaggcacacacctaccgaccggaaaccctgcaccctgtcgctcccagttcacctcctaatatgcgcctatagtctgtgctagtagacattattttgtgtgttgtttcccatctggcatgtctggccccggacccgccgcgacacgcggtggtggataacagaccaggacccccggaccatagagaccagggggacgagacagtcccccggtgaggatgtctcgatgtgcagatcaggaacagaatcgccgggcacgacccggcgccggtgccggtgcagtgaacccgtggcccatcgactccacgaacgaacgtctcgccttcctcaactggtgttggcggcaaggctactcagcagccatcgtggaaacgatggacgccgcgggagcctacgaccacctcgacgacgaccagaccagcaaccagcacgactaacgccgctcccagcacgggggaaggcggcgcaccaggtgcgccgccttcccccgtgctggtgtctcgtcggcttactggtgggggtcgtaggggaacccgtaggtgtgttccagggccttgcggagaaggtcgttcatagttgtgtgttcggcgacggccttcatcttcagcgccgtgtgggtggcggtgggtagcttgacgttgaacgcggtgatcggggtcttggccgactggaaggtttcagagacactggctccctggctggccgccatttggtcggcgtaacggctggctttgtcggcggcggtgggtttgcggttcttactcacttcagcatctccttgattcggtcggcaacctgggcgaactctcctagatctgttggccgggttccgatggcttgccgataggcgacccgtcgatgaacctccgcatcgagaacgtctaggccctcaacggcggcggccccctcgtgggcatcacggtattgcctggtccaatcggctttgttgaagagcagggcccggcgtgtgccgtgggccacctggtaggtcattagcgctcggtccatgtccaggtcccccgactcggtcgggatgatgaccacatcggcgatgtcgagggctgcggtgatcgtctgagagtcaccggggggagtgtcgatgatgacaaggtcggcgtcgatgtcacggcagcgcctgacgataggggcattagccgggcggacctcgaagcccagcgggtcaccagtctcgaaagcgtcggtagcccatgacgtcgccgatccttgcgggtcggcgtcaagcaagatgactcggtactgagctgctaaggccgttgccaggtagaccgccgtggtcgttttcccgaccccgcccttggtgttgacaatagaaatactacgcataaatacatcattacacatgtgcatcgatgtatctgtatatatgtgtatcggcgtgttgtgagggaaaacccgggccacatacaacgatcccccagccaccacagccgggggatctctcagtaaagccagcaactcccacagaagttgcacccccacgatacccaccacatccgtgtcaagcccccacaacacccaccagcgccctaggcttcccccatgaacattgacatggacacaccaaccgaaaccgaagccgacaccttcgatgccgtcctcgccgacattaaccacatcaaccgcctcaccgccgacgaaatcgagtgctactccatgggagcctgtctcctcctcctcaaccaccaccccttctccgaactccgccaacactgggccgacaaccccaccgacgaaaccacgtggaccctctacggggccatcatcgccgcctccaccctggacccccacctcagcatcgacgccctagcccgcctctaccagctccccctcgacctcgtgacccaagccctcaccgtctaagcgtcgatgagcgggggagaggtagcgcactatcggctaaggaaccccacaaacaccaaacccttgtcactgggaagggtttggtgttatgctggtctcacaactcaacagaggaggtgagacatgggaaatgagtaccagaagtcgctcaaagtcctgttcaagaaactggaatctgagcaaggagcccgcatcgagacccggcgcaaaggatggatgatctacccgccggatacgtcacgatcagcggtcatgatccacaagactccatcagatcgcagagcatgggccaacatgctttccgaactgagacgctcaggattcaccgtctaactcagtgaagggggctggagctccagccccctttcaaccacctcccccggacaccacacaagaaaaggagaacatgatgtggcacgttcggttgtcgcttcgcgcaatcagcgaggacatgctgttcgacgccctggacaccctcgaccccttatccccggtggccacactgggccccgatgagcacaccggatcattggcggtgttcgtcgaggctgactcactgacagacgccatcgagactgcccgcacagccatcaccaacgcatgcaacaccgccaccataaccggcgtagaagcccgccccgaagacgaatgcttcgcagacgttgaccggcccctgttcccgccagtggtcggatacaccgaaatcgctgaaaccgcaggactctcacgtcagcgcatccgccagctcgcaggcaccgccgggttccccgcacctgtcatcaagaccgcggccggcccgctgtttcccaaagccgccgccgagcagtgggcgcggacacgccagcctaaggcaggccgcccaaaactccagaccaccacctcataacacatcccgtgtgctgaacctgtt

SEQ ID NO: 192 - DNA, 3927 bp, Propionibacterium acnes
  source 1..3927: mol_type = genomic DNA
ttggtattggtaggcgatggtgtcaccggttttgttgcggatgacgtcgaagccttcgatgtcggaggggatgtcgtcggcgtcgtagacgacggtggtggtgacggggttggaggccgacatttggccgatggtcacgcgcagcatgtttttcaacgcggaggtgaggattgtcgtggcggtggggttcttgtctgcccagcgtttctcggcgatgtcgatcatgtcttggatggttttgacccatcctcggatgggatcgactttggtcagtttgatccctccaaggaactcgatgggcttagtaacgggcccgtcaggaccgaattcggtgtcccagccttcgtcgatggctagtttcagttcggcggcgtcaacccatgtttcgtgggtggtgccgggcacgttgggccaaaaccatcctgctcgtcctttggtgcgtttgaccggtagtaggccgatgtcgtcccaccaggatggcacggtgaagcggatgtggtagcgggccgggtgccaggggttgttggtgaacaggtcgtgagcttcggtggcgctgagcagagtggcgggtgcggcaccgatctctccggtcactgatccggcatacatgaatcggccgtcgatgtacacgaagttagggatagggccggcaggcacggtggggcgccaaccttgttcgcggtcctcggggttgccgtcgtcgacgcatagttcgtagcggtgctgaggggaggtgtgttggatgagtgcgcccagttcggggtccatcggctccatgcgataggactcgggggtccgtagcttccagaggttgattccttctgctccggggcggtccatgagggcccagtcgcggtcgattctggtggcgatgatgtgggttaattcgcgccatgcccagcgggcctggattggggtgagggtctggccagggaaccattcatcagcgaccagaatgtcgaggttgcggtcggtttctttgtgggtgaaccggcctcgggcgggccgcccggacagcatgaacaggccccgcacgtgccagtcctggttgaactcgcgggtgtgagcgggggtgtcaggcagcagccaggattgaggctggtcggggatgttaccgcagacgatcaggcgtcgggcgttgtggtgtagcgcggttgttagcaggtctgacagggtcgcgtgcttggtgcgccgcccccctagcactggcaggatctcgtttccggccgcgtcgactccccgggcggtgtcgatgtctagccacactgtttcggggtcggggggccgatgtggggcgggacggcgctgctcctggtcgtctctcatggtttcctcctttgggccagggagcggccggcgtcgagggcgttcatgcgctcgcgttgttcttcgcgtagttggtagacccggcctcgtgacactcctgctgcctcggcgatggtggtggccggcaggtggccgatggcggcagcgtcggcaaggacgtcacgccaggccaggtcaatggttcccagctgggctagagcttcgtcgcggcggcgggtggcatcagccactacggaggcccaccctgtggggtggatggtcttgacgacgattcggttgtggcggatggggccccatgcatcagcggggacttgccagccgtgattggcggcggactcggtgatcttgaggcgtcgctcaggtgcgcgggtgcgggcagtgacgtcggtgttccaggtctggactggtacccacgtcccctctcggatgcgttcgatgacgcacgtggtgacctcgtcggtgactgtgatgaccagacgataatctttcccgtctggggtggttcggtagctgggcatgtcaccctcccctatctgtcaaatgagctagacacagtgtctatttaatttgacgcaaagtcaagtgcattagacgcctttgtgtggatccgccccaccagacaaacactcgcgcctcatgacccgccgcgaagccttaacgaaaccaaaccgcttatagaaccgctccgcagcgctccccgagggctttagctccaaggtaagaccttgctcgtcggcccattggcagacttgtgtgaggatctgtgagccgtagccctgatttcggggggcggcatgcacgcacatcagcatgtgaccatgacggcgggtcggcgggctgacataagccccaccacgccagtccggtgtgatctgccaacttcgccatgccgcagcgcgccagcggcgggcctcggtagccaccatgatcaccatgatgatggacagggttacgacgccgactatggtcagctcactccagccaggccagttcccggagatgatccagcctcccagcgcccagatgatcatggcttccacgcccgccgcaatcgggacgagtggggcagtacggatgcggcctgccatgatctcggtgatctcgctgcgatgccatgacaaggagaattcccacgactcttgaatcatgctgatgtgtgaacggcttcctcggcttcgccctgccatagcttctctagacggcgctcggctagctcgtcggggcacggcgacagcctgccgcactcggagcagaccccgaagtggcgcgagagagtgatgaccggctcatcgggagcatgaaccgattcaacgaccgggtgctgctcatcggtgagtcctgaggcgtgaccaatctcggctagacggaggtgaaccataccgtcgtagtagtcgaggccttcaacgtggaacgggtaggagccgtccgcggtgtggcctgcaaccaggtccccgacttccagctgactggcggtcatggttcgcaccggcggcagcggggtccgggtcgcgttgatcctcatggtctctccttgcttctgcgccttcatagatgaaggtgccacagccggggttgatgtgcggaaccacagccactttttcaataaatccatcaccacggtctcaccccttcccaaatgtgtaaaccgtggtttacgctttaaggcatgatcgaacacacaccgacacccgccgcgcctcgcgtggccatcatttcccctagcgggccaccacggttcttggccgagcctcccagcgccgcgctgcgacgccatggtcggacccgcatgaggtcccttcccctatcccctcacattcgcgcctgggtctccaccagcggccgtaaacccaatcccatagccaccgccctgatctggatgcataccggagccctgctgccggtgtgggacaccgccgttttgactgggcctgccctcggcagacgtgtgcgccctctcagcagtgacgccgaactgacctctcggcggtggctcgaccaggttgccgaccatcccggctttctcgacacccttatcgaggccgcccgcatcaccgatggatggcatcacgcgacgcctccgcacattcaggccccttaccggacccttcatcagtgaacggaggtacaacgacatgaccagcgacattgacattgaccggacccacaaacccgacgaccgcgccgaggctcctctttaccggtcctgggccaggagactcgtgcacgtctccgggatgccctggcgtatcgtcgccgccttggccggggtctcccccacctccatgcaccggcttctattcggccgcaacggtcgacccgtggaatggatcggcatcaatgatgctcgcgccctgatggatatcggcatcgatgatctcgcctcagcgtccaccgaccgtatcccggcccgcgaatcccgcgagctgttggtagccctgcacaccctcggctggaccgatgagcatctaagccgctggctgaccagttccgacctcgacctgaccaccgcccccaaagccctctacgtcactcgactatccgccgcccgcatccaggccacctacgacatgctcatcagccagcccgtccgccgctgcggcc

SEQ ID NO: 193 - DNA, 2076 bp, Propionibacterium acnes
  source 1..2076: mol_type = genomic DNA
tggcgaaacgatcaggcgagccacgaccatcgccaagctgaatggagagcgagcatgagcaccacccctgccgggttcgacttcgacgctctggccgagtgggccgagagcgatgaggcgacccacaccccgcaaaccagccccgtgttccggggcaaggacgccgcgcgcgccagccgcgcattcctcggccgaggacggcccaccctcggctcagaccacgccaccggcgagggccggtcgccccgccgtcaggtacggctcgacgcacgcaccaacgcgcgactcgacgcctacgcagccgcaaccggcaccagcgcctcccagatcatccgcgacgccctcgctgactacctgcccgcctgatcccaccccaatccactcgggcgcctgtcagtgccccctcttctgggtggtggtccggggcgtcaccgccccggaccagttgggtagtcatctcagttgaaataagcgattagtgatacgcccctcatgctttccggtgctgtcatgagcgtctgacaacagcgacacctcggggcagccgacggacagtcctctggctgccgctctgatcccatgcccacggcacgaaggtgtcggacagctcggtctcgtcatgtgcccaaatagcgtcgtgggcctgtcgccaagcttctcgggagccccacacgggcacgaccgggccacaccggtgtcctggtctccagtgtcgcgacactgtcgatttcggtacgtgcaatgcggcggcggtttgacggatcgacatcccagactcccgcgcgtcccagatcgccatgtggagagtatttgcctccagtgcggccgccacacttgcacgctctcgcgcacgctcgaatgcccgcctagtgctctcaaatgtcgtcacgacgcctccccctgaaaatactcagggtgtcccacggtgggacaccctgagtatttcataccccaactcgcctcaccacacgtcgacctcgacaccgatcaagcgacccgtatcagcgacattgccgtaccgctgccccgcctggtcctccagccacgacaacgcatcccgaaacagcccgacgtcttccaaagctaaaccacagtcgtagccgcccttgtcccccaaccgcacaatctggcgctcccggtggcctccctcgtcgacctcgatccacagtttcgcgtgcatccgctggcctcggccctctgacaggatctcggtgagcaggtcggacgcctgccctcgcgcatcctcgttactgcgggggaattggagtatgtgggaggaacggtggtggggcaggtttgtgacctcgtgacgcagcaggttgcgcttgtgcatctgccgttcgagacgctcgggctgacctgttgacggggttgagccgtggcgccgcttcctcggcggggtctcgatccgttgctcttccggcggttcggcgtcaggttgtggtgcgcgatctcccctaggacgggggggctcgccacctatatccgagggacgatgagacggccttccacgcttgctgcgcactttcgcagcccgccccttgcggtcacatcgacgcggcggcggagtgacgtcctcaccgcgcgctaactgcgtcaacgccgccaccaggttggtgcccggtttcagccctttcagcacgaaccgcaccaggcgggggtctcggccgattcgtcgggcaatctcggcttggctccacccttcggctaacagggtgcgcaacaagtcttgggcccggttatcacgctcagtcactggtcgcctcctcggggagtcctgcctgctcggcctgctctgatagagcagcccgttccgatccggtctggggcgctttcaggggaccgggtaggacacctttgacacgcagtcgcccgtccttgccgtcgtcgccgcccccctgggccacagggagcgcccaggggggcacgttgctggtgtagatggcgtcgccgtggatagccagcagggtgcgggagttcatgcgtagtgctcctcccttggttgtggcgttttttccggtggtggggtcggcgatgggtgtgttgagggtgcgtacgcgggacagggcccagata

SEQ ID NO: 194 - DNA, 13067 bp, Propionibacterium acnes
  source 1..13067: mol_type = genomic DNA
ccgaaacgttccagcccgccctgttcgagctagccgactgcgcatgagaccccacacaaacatggttgaatcgaagggctcagccagcagccagttaccaggagtccccgtgcgtctataccgcgctgttcttacccacaccgacatccagatcaccgtccgcatctggagcaccaccgaccacgactggacctggactcccctcgacacctggacccccgacccgaccccgaccacaccagcccaactggccgacgaactccaccgacacggatggaccacccccgaggaccccaccaccctcaccaaggtgactgtgatccccgagaactggcaggccctcgtcgaccacgccctcgctgcccgaaaccaccaagccaaccagctgcgcgtcgccgagaacatcctcaccgacatcctcggcgacgccgccgacgccggcctgtctgtcaccgctctcgcccgcacgaccggactatcccgagtcgccgtctacaaacgcagcgccaaaaccatcgactccatgagacacgccacccaggccggcggaatcctcaccccctcctgtctcacccacgctgagagaacagcgctcggcctgcccgacgagtaacccatcgtttacatcctcgactggtccctgcgaccagtgaaccgtgcccccactgcgcccacaatgatcagcacacccacggcgatcatcaggtgggcagcactaactgatcccaacgaaccaagatcaaacaagccctgcccgggagcgtcgagcagtccgtgggcgcgaagccatgctccgagattgccaatgattttggggatcatcttgttcagtagggctatccctccgatgccgacaacgaggaagacgaggatttcttcgcctgcgttgtttcttcctgtgtttgcgatcatgctgccttctcggggtggatggccagccagctgatgaggttgtcggtgatctgccctgagatttggatcagttcgacttgcccggcctgccatgcccgtgatgtgccggccagcaatgatgctgggacccctactgcgcggccacgggatgcaacctcagccaaggcggcgcgtaactcctcgacggtgctttcgatgtaccaactgccgtcagtactagtctcagcggcatcggtggtagcgataagagcatcggtgaggtcgtcgacggcgcggtccagatcagcgatgtccggtagggctacaggagtcatggtgtgtcttccttctagggtgccttcactggtgaagggtccctagccccggccgatgtgcggtgctgtgggaaaaatgcttcccattggtccgtcttagttaggaaacttggcctaagtgctgtcgagggtcgcgtgttcgtgaccggttcgaagacactgccgccttgccttcttgcccgtggcgcttccgagatggggtcagtgggcgatggctaggccgatgagggcgccgctgcacaggctgggcgcccagggaaggaatcgggtggtgtggtgtcggaaccgatcgatgagggcatatagggcgatcagagtcagcccggcgatgaccgtggcgtggatcgtgtcgatgccggttgctgcggccggggctgcccacagcggtgtgatgcgcacatcagagaagccgaatccgcctcgggagatgacccagacgatcatccacgctgcgaagatgatggtggtagcgatgacagcacgtatcgccgcagtatggttcgcgagagcgatcatggccacagccccgatccatccaacccagccggtccaggcgagggctgccggtatccatgtggtgatggcgtcaatgacggcaacccatgccccgatggtggctagcagagcccaggccggccaggtgggtgctggggcccacgctacggcggcgatcatggttgtcgcagatgcagcacagacagcgatcaagcttcggagactgtaggtgtcgcggtaggcgatcttgtcggggctggcggtagctggttctggcaggatgtgggtgagggcaggccaccctgcggccgcaatagccgcgacggcgaccacccacacaatctgttgcatgggtctcatcatggcccatcaacgccgaaaatgggtggccgacatggggtcactcgtagaggggatcgaggggtgtgcgggcgagcatggcttcctgtgtgccgagcatgagggtgccagagtcgtcgccggccgattcccagtcgacgatgacctggtcgccgtcaacgctggattcggcgatggtcacccattgcccgtccatgtcgatgagcatcccggcggccagctctgtggcggcaaccgggtgggctgggctgtagaggaggtcgatgtcgcgggcagggtcgtcgggttcttcggttacctcgggtggggtcgatctggctgtctcggtgtcgtcggccaggtcggctcccaggatgcgctcccattcggggctggttttcttgcccgctgaggccatcgtctcgtcgatctgttcgtcagtgggccacacaaatttctttttggtccaggtcgtggtgtcgggtcgcagctgatccagcagttccaggtcttgcggggagtgggccttgcgggggtcgggggtgtagaagaattggacttccttgggggctgattcgccggataggtaggtgccgcggccgcgtttgccgaacgggatgcccacgccgacgtgttcggagccgaacatcatgcgggctccgtcagcggacaggggtccggtggcggcacgcccggagaagttgtctcggatttcgccgcccaggaactcggcgtcggggcgttgggtccccagatcgacgtggatacggcaggcggctgccatgcgcagcagggagccgatccagccgaaaacggggcattctccgggcatcccagagaccttgatcgttgaccaccagtttttcgcgttgccgtagaactggcggtactcgtcgatgaggaccagcacgcgggtgaagtcggtctcgcgggccccttcttcttcgatgcggcggtagcggtcctccatgagagaccacagccagtggatgagggcgacctggtcggggacggtagtggcgaccatctcgatgttgggccactcccgcaggcccaggtactcgatgcgtttagggtcgatgacgaagacgcgccagttgcggcgggcaccctcgacggcgtcgccgatcatggacaccgtttttccggtacgggtgcggccggccttgagctggtgggccatgacaccggagatgtcccagaaacaggtgttgccgtcctcgtcgacggcctgggggattttctcccagtctggggagtctgggcccggaagggccacgggtcggggcaccatcgagggcagggggtggcggcgggtgacggtgatggtgtcgtgttccaggtcgaagtcgctgcgccactggccgagcatcatcgccgaggtcaccgcggccaggcgcaattggatgttcgggctggacaaatgggcgccacgttggtggtgaatggtgaagccgtccaggttcccccgatcggttttccaggaatcgacggtgaccgccgacccatagatctgagtggctacttctttagcccgttccttgtctcggtccagatcggttttgtcagggtcaggggtcggggcgcggtattgcaggacgaaccggccggccgggatcgttgcggatgtcaccgtgaactctgccggcgaccaggcagccgcggccgcctgggtgagggccattggcatggtctcgacggcagcctcctcgggggggatggtgagggtcaggcgtcgcggatgcgtcttcttgcgattccatgtgactttctgcctcaccggcaccttcgccgccgactgaatggctaggcgagctgattcggcagtttcggtacgccggccagcgcgtagcgcccgtcgtgcgtgaaggctgcccaccacagcacagcccatacacggcagccaccagcgcggatcagcggctgctgcatagcccccggtagctagtaccgcacctgaccagccggccgcgatacttttccacgccggtttcgcgccaccaggaccagcgttatggacggtctgcttcgaggctgcggagggacgagacagcggagtgctggtcatgccgcggcctccttgtggcaggtcatttcacaggcatgccggccagcgatgatgccgtggcgcaccgccccggtagccgcatagaccgcgcacaactcaaacacggggcacccatcgcaggccgccgggttcatgctttctttgtcccacgatggtgggtcatcggtgcacggcacggccaggccatcctgttgagcggcgctgatagcggtgaataggcgcagctgggcgcgaacttggtctggggtcaggttgacggtgcgggctacacgcatggggttccttcctcttcaccagtgaaggttccctagacccggccgatgtgcggagggatttcagtgttttatcgaggtgaccagccagccggtctgcgctgcgggttcaggtaccagggtcagatgcagcatggtgtggtcggctaggggcacggcgaccaggggcccgtcggcgctcgccccggtgagggtgggagttccggccacggtggtggcgggaatctggttgggtttcgcggccatcagggagcccatgagggtcggggcggcgatctggacgagggcgactttgcgggcggcgggatcgcgggtcaaccagccgcgggtgaaggtgagcgcagccgacgtgatatcggggctcagcggggctggtgtggcggcggggtgggccgttgaggagggccatacgcgcggtagcgctggcgacatcgagcgggtcggagtggggtcaggtgtggggcttagggtccgatgtggcgatggggctaccgccccggtggtgggagacgagactggttgggggtggtgttgaggacgtgggatcagggtgaaggcagccaaactggccgggatgaggatgacggccgcgccgacacttcggagcgaggtcatgtgacgatccttcggtagctcgacgggttgccgtagatcttttccacgttgatgccactatgtgggttgtcggcgctaaccatttggcctccaccgatgtagacggccacgtggtgggcagggcttccccagaggatgaggtcgccgactttgagctggtcacgggccaccgcggtgccgactttctgctggtcggcggcggtgcggggaaggctaatgccgatacgccggtacagcgccgaggtcaggcctgagcagtcgtagccgccatcggctttgccgttgccaccccacacgtaggcgtaggagttgttgtcggcgatcgatttggcccatgccacggcttcggccaggttcttcgacacaccggtctcgttagcggccccggtggcacagttgtttgacaggtgccctgtagtagtggatcccactatttgtttggccatggtttcccatttggcgtaggcatcgggcagggctgagccttgcactgcctgagctgcctgcgtcagcggcatcttctgccagtcagcgatgtcgactaaaccgggaatgtggaatccagggccgccggccgatccggggccagcgtaggtgatggtgtggcctttcaagaacgcctcggtggcgtaggcatcattgttgacctgatccagagtcccgtaccagcccggcaggatgcgctgctgaaaggggccggcgtcaccgtcaccgttagccttcgctgaggtagggtcggccccaagatctgattcttgtttggcggtcataatagcgatgaccgctgcctgggtaggcagtttgtcacgctggaccacagtgacgatggtggtcacgagctgcttctgcctggccgtgaggcctccggcacccacagtgcctccggtgacggtacccacgcaagcatccccgccgacactgccaccgccgccgccagagttgtcgtcgagggccccagagcctactgacagcagcggcacaatgatcacggtcgcgggcaagaccgccaggcccgccagcatcagcactgctgcactcaccacggcgatcacgtgagatgctttcaacgctgcccacctttcgctggtttgagggggcgacgcctgctggtacgcacaggcttggttggtccagtccgccgttggttggcaggcctgggtttgatcggcttgctgggacccggtttgggctccggagtcttaggctccggcttcacatgcctaggcacttcggctgcggtgggaggagtcagcacgtggcgtaccggcttggtgaccttctgggcacccgaaacaaccggcttagacaccaccttggcacctttgaccaccggtgcggctgccttcgcgccggccttcttgactgcacgatgcgctttgatagccccggcctcggcccggccaaccctgctagcagtagcatcgagggctctgtggcccgtcgttgccctcaccggtgcatccttgccctggcgggtctgcttagcgatcgccgacatgccgcctcgcaatgccgaaacatgattgtgggcgtgggcgatcgccgacatgccggccgtcgcgatttttgactggccctgcggggcccctgccccagcacgaatctgctggtaagccgccgacgtgccacgagcacccgccgccattcgcgccaccttcgcagccctagtcactcccgtcgacacgccacccgtggctaccgcagcagcacccgagaccacagtcgaggccatccgccttcgacccaatccggtgagcttgcgaccaccgctgcgcaccatccggcgagcaccccgcccagcccactggccaatcgccgacgccccttcggaacgcttgctgcgcatccaatcgttgatcttgtccctcagccccttctcgcccttgtgacgacgccacatggacatcaagaacccgataatccccacgagctcgagcatgttgacaaccatgaccttgatggcgacatcaccgtcagaggcgaaaaccgacttgatgatgagcatgaccacacccaacatcaccatcgacccgacaatgccgatcatcgagtacaagatcgaacacagatcccggatgagcggatctgtgcggccagggatagcccgcaacacgttgagcatcgacatgaacgccgaccacaccaacttgcacacgtagaaccagcacatgcccgcgaacaccagcaggaccacagccaaacccgccaccgtcgacgagtaaaagaagaaccccaccaaccacgaaccatccgcaatatcgccggcgtaatccgacaacccctcatcacagtcaccaaggtcgtcgcgagcatccgagacgtcatcgtaagggccacccttgagcacctcgatgtacttgtcgtggcacttcgcatcaataatgcggccatagttgagctgctgatgaaccggcgccacgaacgagtccacaatgatcgccgacagcttcggatccttcgagtctcccgtcgaggtcatgtcatcaggaatctcgacctcaccagcggtcgccgtcgcaggatcaaccgaactggtaatcatatgagacagcgccacaccgaactgctgggtgcgagccagcggagtagccaacgtcgtcgtatcgcctgcgaacttcgccaccggggccgccaagaaacccaacgccagcgccgcagcaatcgccgcacgcgcacccgtagcccacgcccctgccgtacgtcccctcatcatcttgacgaccacgcccacaccggcgcacgtcgtcagcaacgtcaacaccgttccaccccagctgtccgctcccagcggggccaaaaccttgtcgtggatgtcgttctgtaaccccaccagcggtccggtaatccacccgacccagctcatcgccacggtccagtccaacaaccggcacaacagggcaatgaccatcaggtacgtgttccaacacatgccaataatggaggcccacatagccttcagcggggccgtaacgccaccatcgtccatcgacatctggtactgaaacaagtgaataccgttggagtcagtcacattgaaaccgtcacccatccagcccagccccgggcccgatgccatggcaggcacactgctcagcgccaccaccagaaccagcgtggtgacgatgatacggaaccgccgctccccggccccggggcggcgtggatgacggctcacgctgtctcctggtcgtgctcgggcgggttggagctggcggcttcgcggtggggagcgtaggcaggtctcagtagtcgaatttcaccgacgttgccgtgttggtcggcgtacaggccacaaccggggcctccggggttgagggcaatcttgaccaggtcagcgaactcttcaggggacgttttagggtccacgcccaggaactcgacacctttctgggcgaggttgatgttgtcgcacagcaacacgatgcgatgctgaatgaggttgcggacggtctcgttggggtaatcggcctcggggtcgtgggagccggtgataagccaggcattggctcggcgggattcgcgcacgtactcgtcaatggcgtgggaggcttccggcgaggacgacatgtgatgaaactcgtcaacaatgaaagcggcgtcgcgggcccggtcgctgaagcacaccaggcgagccagacgggcaatgagcgcgtagagggctcggccaaacaccttgtgcgggggcagctgccgaaacagatgttctgacagcatctcctcggcgttaggaagagcgatgccacaagtgccaatgatgaggatgtcggcactcaggtcggcgggaggaaggtccgggtcaaagatggccgaagctagggaggccgagttctcgatgtcagcgaacacggcaatcctgtcagcgatcgcggtggcctcgggaaggtcgcactcctcggccaggtggcgggccaaacgcccacacgaggtgatctggtggtcacgcatgtaggccggtttgaggaccttggccagcgtggtcccggccacaccgatggtctccaagttaagcaaggtcagcaagaacgactgggcgacctgcccggccatctccgggggaaggatgcgcagcgggtccagcgacagcttggggtgggccgtgtcgacgatctggcgtctaaccccgtcgatagagttgacaaaggttacccactcccgctcatcggagttgtcggtggcaataatgcgcccgccccgggccgcgatggctgcgcacagccgcttctcggccatcgtcttgcccgcgcccatcttgccgatgaacgccaccgtgttgcctttctgatcctgagtgtcggcatgcaaatcgaggtaggccagcgactgcaacggggagcctgtgaccacagccaacgggatgccggtggtacggcccaaccggtactcaaccaccgggatagatgcggcgaacgcggaggcgtgagtcagctgacggtaggcgttaagcgaggaggagaaccggccaccgggccgggcagcccacagcaagtcctcctgacggcccacgggacgcacccacgtgaagtcaccgaacaccggatcattgacgaacgctcctgccagctcctcggtggtctcaaagtcaggagacgagacagtgacggtgataagagcctggatctcgacctcacgctcatcggcggccagctcggcgttgtagtcgacgagcacctgagcggaatgctcgatagacatgagggtcgaagcctgggtcatctcaccgccctcgacgttgtcgagctgatcgaccgtttgacggatagcccgctgatttttctgcatcgcagcgtgacgggtccgggccactccccggatcgccacgtcgaccggcacgccagtgtcgtcgatacggcccaaaaactcgtaggcaggccacgtcatcgtgcggggcaccttacccagcacgatatgggactggtagacggtctcgccggtgtcggcaccgattttgaggacgcgacgattccacgcctgagccgtccgggacatgtgggagactcgcttgtcatcctcgctggccagcaggtcggaggtcgcggcctcatcgatgaccaactcccccagcgcggcacgtccaacctcatccatgagggcgattccctcgccaggggcatcatcacgcaaccgggtcgggtggcctgacaggtgctgccgaagccagatctgttcatcaacggtgaccgggcggggttggaacgctgccggcagtttcgcaccgaattccttagcctgacggagggcccactcccgtgcgacacggccaggagcggtggtcatgagtccggcggcttcggtgattttgttgagggcggcggtccaggcggtgtgggtgcgtattttctggtcttggttgagtttgatcgataggaaccacacgcgccggcctagggattcggtttcaggctggtcgagggtggcgtcgatttcgtcggcccacacggggtgttcgctcaggtcgaggccggcggccatggcgtcgacgatttctgtggggtcggtccaggtgagggctccgttgaggcagaactcgtggcgggcgaggtggcggaataggtcgcggtgagctgcggcgacggtgagggaggcgttctcggtgacgggtcgctggaggggagtgagtcgccaggtggcccagatgtcgccggtggaggtccagacgaggttgtcgaagaggaaccgttcggggatggacatcatgactccttttcggcggcggcgaggaaggcttccaggccgctgcggcgtacagcgttcccggtagggtgcaggggttttctgggggtgggttcagatttcgaatgtgggaggggtttgtggatggtatcggtgtcctcggcgagggcttggtcgagcaggcaggtggccggggtgtcggtagtctcgtccagctcgtcgatcatctcgtcgaggaggttgggggtggtggatgcggcccacacaggtgggatagccggtgcgggtcgaggcggtgtggggaggaggagtttggtttggccccagaggggtgtgtgggtcatgccggcgggagtggtggcggcgtgagtggtcacacgccaccagcccgccagccatgccagaggtgaccaggtccagtcgatgcgaccaacaacgaactgggcgagccatccggcagccagcgcgaaaatgaaaccgcggatggtcatgcccccgtcgataattttgaagcccatcatcgcggcaggaactacgccgccgacagcgagcacctgatagatcgtgtagggcccgccaggaatccttcgacctgaggaatccttaccgataatgcggggctgctggcgggcctcggtgtgccactgaatatccacgatcagctcttgcccaatccttgcatcatctgtccgaagaattggatcgcgttaccttcgataagccagtgcgccataccacacacaaacagcatggagacgatcttggccaggctcataccgtgtttgaagatgttgaacgcggcaatgcccacgactacgaccatggcgacggctcgcaccgcggactgaccttcacctgccttgatcgtcgtccattcgaagaggttctgcgattccagtggcagcaggaggaattgatcgagcatgagaggttttcctttcaggaagccgaccgggatggtcccggtactgacgggctggacggcacgggtgtgccggccaggggcagaaggcgtgacggctggtcgagggaggcaacctcccagcggcctgcacggctgacaagagtcaggccgtactggctggtccgggtagtggattcgtcgccggtgggctggcatgtcacggtcaccgtgacggtaatcttctgccggtctgagggggtggggacctcgtcaggtcccaccacatgagtggttttcactgatacgcatggggctgggtcaaccgcggtgaaagcggtccctgggctgctccatctcgacaggtcagtattcccggtcagcatggcggttaggaagcctgaagaggcttgggcggccgggtcggcggtgcgaagctccgaggtgtctagggtgggggccgaggccggtgcaggcatggggatctgtccaggtagacgcaaggcgatggccttgccgttggaatcgacgtggaccgggactgaccaggcctgtccgctcccggattggccgcccatggtgaccacggtgacctgccacaggctcggatcagacggggagacggtagcgtcataggcggtgacggtggtgggcgctggaccaggtttgcggggcatgcgcgcatcggtgatcttggccgccaccaggtgttccagattgtccaagtgcccggagtcagaggtcagcagaagagtagtcacctcgaccgcggtggctgagacgatctgagctgtgcggcggtcgtgatgggtggtgtcagtgctgacagctgtggtgggagcggatgccggggccgccgaacggaccagggcaacggggccgcatgcgactccgcacagcacgagggcaaggaagcctttggtggccatcgatccggtgtggggccagggacccacgttttcctgtgcctgttttttcttggccgaccaacggcgggacttagggttagcggatgcaccttctggggtgcatgctcgtctcaatcgcatcggtcacctccttcactggatgaagggaccaaggaggtgaccgatgtgcggtcgaacccgaaaaagttcaaacttttttctgggtctgcctcaagtacgacagaaggcctgcatcatcacggcgttgtggtagcagatcttgcgtcagcgcaaatgtatgggcctcgtaggagtagctcttaggtgggtcccggtggttgcggccagggcgagggtgtcgggtatgtgtagcgctagtcccgggttcgtggtgtgagggcttttgggtgctgacatgcactacccattgctagacgctgtgctgtggcatggctggacgtctagcagacgggttgacatcacctttaggctggcagcgcccgaggccgcaggccagaggaagcggacagcctaacgattgacgtccccctctcctttccccaacctcctgga

SEQ ID NO: 195 - DNA, 9465 bp, Propionibacterium acnes
  source 1..9465: mol_type = genomic DNA
tgtgtgggatcagctgtgccgctcccccgacatggcagacagcaccgttgcatgagaactgactgacactgtggcgccgcggaggtctcccgcggcgtccgctggggcgagtgcatgcctgtcagctcatcttttatcgtcatgtttccccttgtcagagcggtctttgcaaagtgacaacgtcaggggtcttgacgacaacatcctcgacaacatcgtggcggtggtctgtgtctcgtcagttcaacgcaccggggaaagaggcaccgctgatgttcaccaccacaaacaccctcaacgatgagtgggaccagattcgcgccactgagatcgattggcatgactgccctgaactgatgcactgcatcgacgttgatgatgtgttggccgtcattcctgccgcccccgacgccatcttgggctacctcattgcccgggctcagggcggtgacgagttggccacccgcactatcatccaagcgttcacaggcaagcttatcttgatgaccacggccaccaaggtgcgccgtactaatgacggcttcaatgatctgttggcgggtctgtgggagacgatcatcacgtacccgttggatcgtcgccctgacaagatcgctgcgaacctcatcctcgacacgttgcaccgggttacccggttctggcgtgctgattcccccgatgaggaagaggctcacggtctggtgcccttccctgacactctcatcgccccagagcccgatgaggacgtcacagctagccaggccatcgccttggcggtggaccgcaactggattaccgaggacctagcccgcctcatgagccatatttactgtgacggtatgactggagctgatgcgggtcgtctgcatggctgcgctccagctacggtgcgatctcgatgccgtgatggtcgggccgtgttgcagcgcaacgccgagacgatcctggccgtctgctgatccctctcttgctcatgcctgccgccaccctacccctacctgctagaaacatagccatgtctccagcaacgcatctagcgtatcttctagcaattgatctagctatgtatatagctgatgatctagctaccatatagctgtgtctccagcccaaaggacagcccaatggcatgcttgccacaggaaggtgcgtcagcctcccgaaatactggaaggagctttaccgtgcaggacatgacctcgaccagaccgattgaccgatccccgttcgaccgcactattgcggtgtggaaccacaaaggcggcacgttcaagacgtccgtcgtggcgaacctgggatacctgttcgccgccggtggcaacaaggtgctgctggtcgacatggacccccaggccaatctcgacattgacttcggtatacccgcgaaagaacgtgaacggggcatgggattagccgaggcgctacgtgaggggacggcccttcccccaccgcagcatctcagcgaaaaccttcacctggtcagtggcggcgctgctctcaacgagttcaccgaccccgcatccttagcggccatcctcgaccgagtcaccaccgcacgctacgacctgctagctcaggcccttgccccgctggcctgggactatgacctcatcttcatcgactccgggccggcacaaactctgctgtcccagaccatccttggagtagcccgctggctggtagtgcccacccgcaccgataacgcctcaatcactggcctcgtcgacgttcaagacgccatcgacggggttgcctcctgcaaccctgaccttcaactactcggcgttgtcctagccggcgtgggggcccgggccacccggatcgccgcagataaacgccacgccatcgacacagtgctgggggcaggaaccgttttcgatgcggtcatccactactccgagaaggtgtccgtgctcgcacgccagcagggcaagaccgtcgccgagctagccaacgagtaccacaacacccagcccgcctacacctacctagctaaaggccagaacatccccaacgtcgccaaggcagccgtcagcatcgaaactgattatctgaggctggccaccgagatcagcgaccgcatgttcaccagcgacgagcaggagcctgatcatgactgacgatccgactccatccgagcagaacaaccccaccagcgacgacatgcgcttggccgaagaatgggccaacagcggccgcacagtgggagccctgccgcgccgtcaacggcctcagcgacccacaccccgcaccaccagccaaccccctgtctcgtcccctgacacaccggctccgaaaaaaccccagaagacccccaccagccagcctggccgtcaacggatcaacgtcaccgtctacgttgtgcccgaactccatgagcggctgcgctcccgatcggcggcgacgggggtgacggtctcggatctggtggtgcatgcgttagcgttcgtcgccgatcatgcgggggaggcgatcgccgatgatctgcgcgtcgagacgggccccggcatgggggccggactgttcgatgtgaccccatcgcggccagtaggggtcgccaaaacccagctgggggtgcgaatgacccgccacaacaaggatggtttggaccagctgacccggacgagtggagcccgtgaccgcagccatcttgtgtctgtcgccgtgcgcgactatctcgactccaaccctgtaaagaaaggccgacatgtccgctgatgaaactcctgccgcccggggtgggcgacgctttgatacgaccgtcaagcccaggcgccgtcccatgcttatcgccgccggtatcgccatcgtgatagtcggcgcgctcctcatcactcagttgattcgctccgcccaaaccgagcatcgcgtgctggaagtccacgccgatgtggctcgcggcgaggtcatccgtgacaccgatctggtatcggtgactgtcggccaggtcgacaacgtatcaacggttcccgcagaccagctcgactcactggtcggcaaacgcgccacggcagatcttcgagccggatcactcttgcctgctggggctatcggcccggccgatgtcgttccagctccgggcaagtcgctggtcgggctgaagctagccgccggacagatccctatcggagaccttgctgtcgggacgaagctgcgcctgatccagacgtcggcacccagcggctcatccaccaccactgatagcagcaccaataccgatggccagtcgtgggaggcaacaatggcgaccggcaccaaaaagaccgagcaggtcaccttgatcaacgccgaagtgaactcgcgtgatgccgcccggatcgcccaactgacgtcacagggccgtatcgccgtagtgaaggatccgatccgatgagcaccattgttttgaccagcgtctcgggagccccaggggtcaccacgacagcgatcgggctgggcagggtctggccacaatcgagcctggtcgtcgaggatgacacccaccacgccatgctggcgggctacctgcgagcctcccagcacgccgaaccgaacctggccgcagtggcgaacctgacgtcgactccaaccaacgcccaaacggtgtgggaatctatcgccagacccctacccaccgatgacccagtcggcgggctgagacgcaaaggcatcctcggcccgcccacgccgtggtctcgcgcaggcatcgacccccgatggggattcatgctggccctgtggcggcaactggaggaggctggcatcgacaccatcatcgatttgggtcgcctagccacaccactgacctcaacgccacacctgatcgccgcacccatcgtcgaggacgccgacatgatcttggtgatgatcgaggcgacactacgcgacatcgccggcgcccgcacgatggtggagggactcgctgagcagatgaacttggccggcgcctaccgacgtctcggactgcttgtccaccgtggcggccaggcccgcggcgtcgccgagttcaatgacaaggagatcacctcggcgttacgactcccggtcatcggggccattacccacgacccggccggagccgcccaactctccgacggggtcgggcagcggttcgacaagtcacgtctggcccactcactatcaaaggtggcggccagcctcgtcgatgccataaacaagcgccacgctgatgacgaggaggatctgtgatggccagttttgctgataatccgttcgacaagctgcgctcccaggatgcggcaagagcttcggtagagcaggagcctgatgccggattagcgtcggagttgttttcgacgtcgtcggggtgggccagctctcagcaggtgtcccaagctcaaccggtgatgacccgttcggagaacgtggattggccggttgtcgcggagctagccagtacggccactgatgaggttgaggctgagatcagcaggtggagttccactcatgatggggtggcgacgctagacattcgccaggccatcgcggagcctgctattgcctcggcggtgtctacgtatgctgaccgacgccagatcgatgtaggggagacctggcctgatctggtacgccagcgataccgcaaggctgtgtgggatcagctgttcgggatggggcggttgcagccgctgttcgaaatcagcgacgccgaaaacatcatcgtggtgggtaaccatgaggtggttgtcgaccacaacgatggttcccggtcaacgctgccgccggtggccgactcggatgccgagctggaatcccagatcgcccggatggcgaggaatgcgaccccgcggcgagccttcgacgccgatcacaccgatgtgacgatcatgcaccaacagaagttccgtatccacgcgatctcttcggaggtgtcgttgcaaccgtcggtggtcatccgccaacatttgctcacccaaatcagtctgggggacctgtcccagcggggaatgatgccggtggaagtggcccggttcctcgatgaggcggtacaagctggcaagtccatcgtggtcgccggcgagcagggggcaggcaagacgacgtttttacgagcgttgatccacgccattccggcgggagcggttcgccacgttggagaccgatcaggagttgttcgctcatctgatgcctggccgggaaaacacgctggtgctgttcgcccgtgatggtaacggcgaggtggatccggcgactggcacccagcacggcgctatcgagatcgcccagctgattcctcctagcctgcgccaggcgttaactagggtcattgtcggtgaggtgcgcggcaatgaggcttcggccatgttccatgctatgcagtcgggtacaggcactatgagcagtatccactccccgcgagcctctgaggtgccgtcccggctagcccaaatgatttcgatgggcccggtctacgatctggatcaggccatgctgcagatcggtcattcgatcgactacatcgtctttgttcgtaagcgtgacctgcctgatgggagccggctgcgatttgttgagcagatccgttcagtctcgcctggtgattcgacaactcccagtcttggcgaggtgtacacggctgactcgtggacaggccagccgttgaccccgctcatgcctggttcggccgccgacgagctgtctcacttcgcccgagacctggattactgcgaggcccactcatgaacactcccgcactaaccagcgccctcatcgtgaccgggttggggctgatcctggccatcgacgggctggtcccggcgccgcctcgacctggtgccccgctgagcccggcccaaaggtgggccaggctcacccaccgtcccacaggagcggccgggcgccgccgggacctgcgctgggggctggctgttctcgtcggcgtcgtgctgtttgtgctcaccgggtgggtcgctgcgctggcgttgggccccatcatcgtgctgctggcccccaccctgctgggggcggccccaccaaccgacatcccgctgatggaggcgctggatcggtgggtgcgtcaggtcgctgcggtgctgccacaggggcgagacatcatcacagcggtgcggatctcacggccgcgggccccgaagctgatcgccgggtcggtggatcaactggtgtcccggttggatggccgtatggagccgagggaggcgttccagcggatggccgacgagctggactcggctgaggctgacgcggtgctggcctcactagcgttggcggccactcacccgcggggagcctcgacaacgttgaaagctattgctggcaacatccaacagcggttgaaagtgctgcggcaggtggaggctgagcggtctaagccgcgtaactcggtgcgccagatcacactggtcacgatcgccatgttcggggggctgctcgtgatcggacggtcgtttctggccccgctggcgacccctcccggtcaggtgctggtggccgtggcggtggtcatgtatgtcatcgcactagtgcagatgtatcggatggcgcggccccgtcgacgcacccggatcatggtcaggaggacccgatgaccattactgctttgtccctgctggccggggccatcgtcactgtcggactgctggtcatcgtggcagcgttccgcccagccccaggccctgacctggttgccgctctggaggtggtgtcgggtcgcacctcaagcgtcgccgagaacgtcgaccagacccggatcgggcggataggtcgcagcgtgacccgcacattccatgtgtcggtgtccccggccatgcgggccgcactgcgactccaaggcacgacccccgaagcgttctacggtcgacgcctgatctgcgcactgatcggggcgatcctgccgtggctgctcaacgcggtagccatcgcggtaggggcgaattccccgaacctactcatcccttcggcgctgtgtgtggcgttagctggcgctggatggatgctgccggcagcacggttgaaggctgcggccgggcccaccaacgacgactcgttcgaagcgctgctggtattcatcgatttggtcgtgctggaacggctcgccaacgaaacctccgtcgacgcgctcaccaatgcggcaaacatgtcggactcgccgctattcgtccagatccgtcaagtcctcaaccgtgcctccctggaaaacgtcgacccgtggaacgggctagaccggctagccgaggacatcaaactgcccgaactcaccgatgtggtctccatcgcccgcctccaaaacgaaggcgcctccctcgtcgacagtttccgggcccgagtcgccgagttacgcgacgcctacctgctgcgcctgcaacaagaatccaccgccatcacccagcggcttggtttgtggacgatcctgcaagccggctcggtcatgctcatcttgctgggggcggccgccctcacactcatcacagccggataaaccgacaccgtgtcgagcccccatatgggccgcgaacctttcataaagatgcctgtaagcaccacaatattgatcacaacctaacaatgaaggagaaatcatgatgaccgatctcgacctggctaaaaaacagatcacctggctggcggcgcacctgcgttcccggatcgttgacgagcgtggcggtggtagctctaccgtggagacactgatttggattggtgtcatcgtggcgctggtgattggtgtgggcgtcggggtgacggcctatatcaggtcgaagatgcctcactgacgacgatgcgtagcaggttcacaactgatcagcgtggcggtggtagcgcgtcggtggggatgctcctgctgatgcctgcgatcatgctgctggcattcggtgggatcgaggtcgggatgtggtgtcacgcccatcagtcgaccatcgcggcagcccaaagcgccgcggaagctcagcgtgtcgtccatccggtcccggggtcggcacaggaggcagcctcgcagatcactagtcatggcggggtgcgtgatacccggatatcggtcagtgatgacggggccactgtcacggtgaccgtctcaggtcgggccccatcgatgctggggctgcatcttccggctgtgtcgtcgacagcgtcgatgcccaaggagcgcctgtcgtgaggcgaagtgagcgcggcggagcaagtctaagcgtcgaggtgctcatgtgggcgccgatcgcgctggtgatcatcgggtttgttgtgggtatcggccggatgtcgatggcccaggacgcggtgagtggcgcggctggtgctgcggcccgtgcggcgtcgttggagcgtgatggacagtcggctcagtctgcggcgcagcaggcggcgtcggcgaacctgtcgtccggtgggctggcatgtgcgccgagtgtgagcgtggacacgtcagtgtttgcccgtcctgccgggcaggcgggcacggttcacgccacggtcacgtgtgtcacctcgctgggtcttggattcgggtcccggacggtgcacgcaacggggtctgccccggtagacacctatcgggaaaggagaggctgagatggcccgcgatgagcgtggtggcggctcggtgtcggtgtggatgctgctcatggtgccagtaattctggtcatggccggcctggtttttgacgggtcccgtcagatatcggcaacccaggcggcccaggacgcggcggttgcggcatcccgcgccggaactgatgcggcagcgacaccgcagctagctggccacgacggggcggccgtagcagtccaagcggcccgccaggcactatctgctgccggggtggacgggtcggtgcaggaggacgggtcgaccatcacggtgaccacgtctcaaagtcggccgacagtgttcctgtcagcgatcggaatcagccaggtaagggggcatgggcaggcccatgctcagcttgtgggaccgggagaacgcccatgacagtgatacgtcgtatcggtgccctggtggcactgctggtggtgatagccggcttacccgccgggctcgtggccgcaggcgccccgctagtaccctcgggcctgtcatgggcccatgtgcggcatctgttggttaccccagacatgaccgggtcggtgctggtgtggctggtcagcctcatcggctggatcgggtgggcatggttcgccctggccgtcgcagccgaagcggtgacgatgctctcaaggcagcggctgcactggcacatgcccggccctcgcctagtgcgccgagtggcagccggtctcctcattgccgcgttcgcggccgcaccggcagccacaagcacggctcacgccgccgagaccacccatgtggcggtcgccgcccaggctggaccggcacacgcggccggcacccaggacagccccgccaccacctctcaggccccggacgcctccaccactccgaaaatctggaagacctacacggtgcgggccaacgactacctgtggaagatcgccgagcactactacggt

SEQ ID NO: 196 - DNA, 3127 bp, Propionibacterium acnes
  source 1..3127: mol_type = genomic DNA
ttggtattggtaggcgatggtgtcaccggttttgttgcggatgacgtcgaagccttcgatgtcggaggggatgtcgtcggcgtcgtagacgacggtggtggtgacggggttggaggccgacatttggccgatggtcacgcgcagcatgtttttcaacgcggaggtgaggattgtcgtggcggtggggtttttgtctgcccagcgtttctcggcgatgtcgatcatgtcttggatggttttgacccatcctcggatgggatcgactttggtcagtttgatcccttcgaggaactcgatgggctgggtgatgggcccatcaggaccgaattcagtgtcccagccttcgtcgatggctagtttcagttcggcggcgtcaacccatgtttcgtgggtggtgccgggcacgttgggccaaaaccatcctgctcgtcctttggtgcgtttgaccggtagtaggccgatgtcgtcccaccaggatggcacggtgaagcggatgtggtagcgggccgggtgccaggggttgttggtgaacaggtcgcgggcttcggtggcgctgagcagagtggcgggtgcggcaccgatctctccggtcactgatccggcatacatgaatcggccgtcgatgtacacgaagttagggatagggccggcaggcacggtggggcgccaaccttgttcgcggtcctcggggttgccgtcgtcgacgcatagttcgtagcggtgctgaggggaggtgtgttggatgagtgcgcccagttcggggtccatcggctccatgcgataggactcgggggtccgtagcttccagaggttgattccttctgctccggggcggtccatgagggcccagtcgcggtcgattctggtggcgatgatgtgggttaattcgcgccatgcccagcgggcctggattggggtgagggtctggccagggaaccattcatcagcgaccagaatgtcgaggttgcggtcggtttctttgtgggtgaaccggcctcgggcgggccgcccggacagcatgaacaggccccgcacgtgccagtcctggttgaactcgcgggtgtgagcgggggtgtcaggcagcagccaggattgaggctggtcggggatgttaccgcagacgatcaggcgtcgggcgttgtggtgtagcgcggttgttagcaggtctgacagggtcgcgtgcttggtgcgccgcccccctagcactggcaggatctcgtttccggccgcgtcgactccccgggcggtgtcgatgtctagccacactgtttcggggtcggggggccgatgtggggcgggacggcgctgctcctggtcgtctctcatggtttcctcctttgggccagggagcggccggcgtcgagggcgttcatgcgctcgcgttgttcttcgcgtagttggtagacccggcctcgtgacactcctgctgcctcggcgatggtggtggccggcaggtggccgatggcggcagcgtcggcaaggacgtcacgccaggccaggtcaatggttcccagctgggctagagcttcgtcgcggcggcgggtggcatcagccactacggaggcccaccctgtggggtggatggtcttgacgacgattcggttgtggcggatggggccccatgcatcagcggggacttgccagccgtgattggcggcggactcggtgatcttgaggcgtcgctcaggtgcgcgggtgcgggcagtgacgtcggtgttccaggtctggactggtacccacgtcccctctcggatgcgttcgatgacgcacgtggtgacctcgtcggtgactgtgatgaccagacgataatctttcccgtctggggtggttcggtagctgggcatgtcaccctcccctatctgtcaaatgagctagacacagtgtctatttaatttgacgcaaagtcaagtgcgctagacgcctttgtgtggatccgcccgcccagacaggcactcacgtctcatgacccgccgcgacgtcttaacgaaaccaaaccgcttatagaaccgctccgcagcgctccccgagggctttagctccaaggtaagaccttgctggtcggcccattggcagacttgggtgaggatgtgtgatccgtagccctgatttcggggggcggcatgcacgcacatcagcatgtgaccatgacggcgggtcggcgggctgacataagccccaccacgccagtccggtgtgatctgccaacttcgccatgccgcagcgcgccagcggcgggcctcggtagccaccatgatcaccatgatgatggacagggttacgacgccgactatggtcagctcactccagccaggccagttcccgcagatgatccagcctcccagcgcccagatgatcatggcttccacgcccgccgcaatcgggacgagtggggcagtacggatgcggcctgccatgatctcggtgatctcgctgcgatgccatgacaaggagaattcccacgactcttgaatcatgctgatgtgtgaacggcttcctcggcttcgctttgccatagcttctctagacggcgctcggctagctcgtcggggcacggcgacagcctgccgcactcggagcagaccccgaagtggcgcgagagagtgatgaccggctcatcgggagcatgaaccgactcaacgaccgggtgctgctcatcggtgagtcccgaagcgtgaccaatctcggctagacggaggtgaaccataccgtcgtagtagtcgaggccttcaacgtggaacgggtaggagccgtccgcggtgtggcctgcaaccaggtccccgacttccagctgactggcggtcatggttcgcaccggcggcagcggggtccgggtcgcgttgatcctcatggtctctccttgcttctgcgccttcatagatgaaggtgccacagccggggttgatgtgcggaaccacagccactttttcagcagatccatcaccacggtctcaccccttcccaaatgtgtaaaccatgatttacacatttggggcatgatcgaacccacaaccatctccaccacgccccgcgtggccatcatctcccccagcgggccaccacggttcttggccgagcctcccagcatcgcactgcgccgacacggccggtcccccatgaggtcccttcc

SEQ ID NO: 197 - DNA, 1732 bp, Propionibacterium acnes
  source 1..1732: mol_type = genomic DNA
tcgctgactacctgcccgcctgatcccaccccaatccactcgggcgcctgtcagtgccccctcttctgggtggtggtccggggcgtcaccgccccggaccagttgggtagtcatctcagttgaaataagcgattagtgatacgcccctcctgctttccggtgctgtcatgagcgtctgacaacagcgacacctcggggcagccgacggacagtcctctggctgccgctctgatcccatgcccacggcacgaaggtgtcggacagctcggtctcgtcatgtgcccaaatagcgtcgtgggcctgtcgccaagcttctcgggagccccacacgggcacgaccgggccacaccggtgtcctggtctccagtgtcgcgacactgtcgatttcggtacgtgcaatgcggcggcggtttgacggatcgacatcccagactcccgcgcgtcccagatcgccatgtggagagtatttgcctccagtgcggccgccacacttgcacgctctcgcgcacgctcgaatgcccgcctagtgctctcaaatgtcgtcacgacgcctccccctgaaaatactcagggtgtcccacggtgggacaccctgagtatttcataccccaactcgcctcaccacacgtcgacctcgacaccgatcaagcgacccgtatcagcgacattgccgtaccgctgacccgcctggtcctctagccacgacaacgcatcccgaaacagcccgacgtcttccaaagctaaaccacagtcgtagccgcccttgtcccccaaccgcacaatctggcgctcccggtggcctccctcgtcgacctcgatccacagtttcgcgtgcatccgctggcctcggccctctgacaggatctcggtgagcaggtcggacgcctgccctcgcgcatcctcgttactgcgggggaattggagtatgtgggaggaacgacgatgggggaggttggtgacctcgtgacgcagcaggttgcgcttgtgcatctgctgatcgagacgctcgggctgacctgttgacggggttgagccgtggcgccgcttcctcggcggggtctcgatccgttgctcttccggcggttcggcgtcaggttgtggtgcgcgatctcccctaggacgggggggctcgccacctatatccgagggacgatgagacggccttccacgcttgctgcgcactttcgcagcccgccccttgcggtcacatcgacgcggcggcggggtaacctcctcgccccgctccaactgtgttaacgcctcgaccaggttggtgccaggcttaagcccttttagcacgaaccgcaccaggcgggggtctcggccgattcgtcgggcaatctcggcttggctccacccttcggctaacagggtgcgcaccaggtcctgagcccgattgtcacgctcagtcactggtcgcctcctcggggagtcctacttgctcggcctgctctgatagagcagcccgttccgatccggtctggggcgctttcaggggaccgggtaggacacctttgacacgcagtcgcccgtccttgccgtcgtcgccgcccccctgggccacagggagcgcccaggggggcacgttgctggtgtagatggcgtcgccgtggatagccagcagggtgcgggagttcatgcgtagtgctcctcccttggttgtggcgttttttccggtggtggggtcggcgatgggtgtgttgagggtgcgtacgcgggacagggcccagat

SEQ ID NO: 198 - DNA, 718 bp, Propionibacterium acnes
  source 1..718: mol_type = genomic DNA
ccggggccctgctgccggtgtgggacaccgccgttttgactgggcctgccctcggcagacgtgtgcgccctctcagcagtgacgccgaactgacctctcggcggtggctcgaccaggtcgccgaccatcccggcttcctcgacacccttatcgaggccgcccgcatcaccgagggatggcatcacgcaacacctccgcacattcaggccccttaccggacccttcatcagtgaacggaggtacaacgacatgaccagcgacattgacattgaccggacccacaaacccgacgaccgcgccgaggctcctctttaccggtcctgggccaggagactcgtgcacgtctccgggatgccctggcgtatcgtcgccgccttggccggggtctcccccacctccatgcaccggcttctattcggccgcaacggtcgacccgtggaatggatcggcatcaatgatgctcgcgccctgatggatatcggcatcgatgatctcgcctcagcgtccaccgaccgtatcccggcccgcgaatcccgcgagctgttggtagccctgcacaccctcggctggaccaacgcgcacttgagccgctggctgaccagctccgacctcgacctgaccaccacccccaaagccctctacgtcacccggctatccgccgcccgcatccaggccacctacgacatgctcatcagccaacccgtccgccgctgcggcc

SEQ ID NO: 199 - DNA, 12176 bp, Propionibacterium acnes
  source 1..12176: mol_type = genomic DNA
aaccgtcatctggcgtggagtagcgagctgatgcaggaaggcaatttgtacggccttcccgaggaagacccgttgtggggcgaggccgtggagctggtagcgggacttatcccctctgtgcgggcgatgtggtcgcacgatgggcagaccgtgactgtgtcggctggccggcgggtggcgacactggggatgccgatgcggggatggcgtggtatcgagatgcgcggctggaatccagtgggcgccgatacgtggtggatcgttgaccaggtgggtagttggctggtcgatcaggatgagccgatggtcgttgacgggagggtgctccatgaggcgtgggaacggtcgcagatggtccgttcaggccgctgagaaaaaatttaggtccgccctgcatatctccgccctgcatatcggggcctcttcataccttcaaaagtgtgaagggaatacagactcttcgactggaattaaaatggtatatggcgtgtccggtccgcacccagctccacgatgcgccataggggagccataacttcaccaatcgtatacgatatgagtgtaggtgagcatctaccggtggccgacagtcagatacaagcatgggcggatgaagcagaagctgattatgacctcagcatgcttccgccgtctcgacgtggtcgcccaccggtggggaggggcccgggcactgtggtccctgtgcgcttcgacgcggacactctcaaggcgttgtcacaacgagcccctgacgaaggattgaccacgcgttctgacgcgatccgtgctgcggttaaccagtggctcggcctcggctcgtaaacattatcggcgcgacaaccttactgatgacgctgttggttacgccgtagagcacatcttgtactcgtgggcgctcgacgatgctgatgatcctcgttgctggatgatgattcggtgttgacccagctggcctcctcatggagctagttatcctcatctacgacgatggctatgaactcctgatccacgccatgaaagcccgccctcagtatctgagctacttcgctatctagtgttgttgggcgagttgaactcaacttttctccgacgcaagcgccaataaaaggctgatccatccgaataccaccaaacacggctgacgtgtggaacagattcagcaagacagggtgcggtgctcgggtgcgttggggagatgaggatattcaggcttctggcgggatgtggcttgatgacgtccaggatcaccggttcggttttgaaggtgccttgcattaatgtcgacagggtcgtacgactcgaggattggatcgaccagcccgttgcgtctgaagaacttcatccaccccggtggagctccggccgcgtactggtgcaacggatcattagcatgggtagcgtgagtatgccttcgatcgtggtcagtgctgtcatcatccaagattctgacgggcggcttctcactgtccgtaaacgaggcaccgaggcattcatgctgccaggcggcaagccggagcccggcgaggactcgcgtcaggcagtagtccgggaagtgcacgaagagctcggcgtcgcattgtcttccgacgacctgcgtcgggtgggagtgttcaccacgcgagcagcgaatgaggccggccatcaggtggtggcgacgattttcacccacaccccggttgcggtgagtgagccagctgctgagatcgagcagattcgttggctcgattggagtgtcgacgccctgcctgacgacctggccccgctgctggtcgaggcagtcatcccgtggctgcggcgccgtatccggtcggtcgctgtattcacgggtgcgaaggatggaaccgaccctcattatcgtgtcgaagcaaccgccttgggccggggtctcgcacacgccgggatcaccctggtttatggcggcgggaaggtcgggatgatgggtgctgttgctgatgcggccctcgctgctggcggcgctgtgatcggagtgatgccgcagcacttggtggacggggagatcgcccatcctagtctgactcacctcgaggtagtgcggactatgcatgagcgcaagcagcggatgagtgacctagctgacgcgttcgtcgcgctacccggcggcggcggaacccttgacgagctattcgaagcatggacatggcagcagctcggtgtacacagcaaacccgtggccttgtacgactcgaccttctgggcaccgctgaccgcgctactcaaccacatgaccatcgaaggcttcatccgccctgaggaccgcgcctcgctcgtgatcgccgataccatacatcagctgatggccgatcttgagggatggaccccaccaccaccgaagtggcgctcgtgacatagaacaaatgattctgactatggctcattgacatctgcgcagcggctactagctccattgacttcaaatcgggccttggccgaggctcggttcaggtggcccggaatggatccccacaaattgaatgctcatgatcgaggtgatgaacgcccactctattgtcctacgcccggttgtatccagcgagcaattgaaggtgctgcgcctgttggtcgaccaggccgagccactcatcatcgacgggcgcatcttgtacgaggcatgggacaggctgcaaacagcccgtccggcccgctagaaaaaatttttagggcccgctccgcacatcccggtctgtacccacaccttcaagggtgtgaagggaataaaaacacacctaacaacaactttgtttcatgatttggcgcgtcggaccctttctgaccgatgtcgtgcgcaacaatggacccatgagttcgcctaccaagatgcgccggaaggggacacgcggcccgaaacctcgcagcgacgaggagctaacggctgtgatgttccgcgtcccagagtcagtggccgaacgtgtcagcgatatggcttgggagctgaggctctcccgatccgatcttgtgggctggtcggccctctatgcactcaactcgatgctcagacagcgcggagaggacacgattccggttccggagtatctggacaaggccgtgctcgctgcgttgtatcccgatgggttgcccttcgacgaggacaacgaggagccgggcgagaatgccgggcaggaggagcttgcgatgactggatgagcccgaacatggttgaaggccgccccgccaggcgaccttcaatcaatggtttcggttgtcagctgcagccacccttgccaggtgctgtggttcttctccagaggaggagggaccgccatgaagaccaagaagacctagaagatccaaaagaaccggtttcggctgttgcttcggtcttcatggtagctgatagcccgcgtcgttggaagtgcgacgacgccgatcctcatcggtatcgcaccctgttccagggtcgagaatgtgaaggattaacaaccatgacaagtcatgaggcgtcctcccggagggcgtcatgaccgctttaattcaagctctgccgacagctgaactgtctgctggacctggtgctagcagtccagctagaccctctgctgagggcttcatcaagattcatcacgaccttattagtgcgggcgtgtcgggtaacgcgatggcgttgttcgtcgcgttacgtaaccagcccggctgtgatcagtggacccgtcactcgtacctgcggctagcccaatggtgcggctgggatgggctgtcgggggcggcgggctgtaagcgggtgcagcgggccgctgctgagctcgctagcggtggttggctggaatcgcgggtcggccatgatcgtcgcaccgctaagacgctggtgtggcatcggttgaccagccccgacaccgaccgctgggagcaattgccgcggattgtgtgggcgaggatctgccagatcgccggggagacgtcgggagagtgggtgaggcattggctggtgtggcggatgctggccggtcgtactggtgtggctcaggcccctatgtccatcgtggctcggttcctgggctgttcttcgcgccaggtctctcatatccgtggggctctcgttgatgccggtctgctcggctgtgacgaggtgtcgggggcggcgagccgggtgtggttcccctcgatggccgaggagtgtgcagcggatcgtgaggtggttgatggggccgtcgtcggtgctggggtgggctctggtgaaggtgtcgaggagggcggggaacccctgtcgattttgtccacccacccctgtcgattttgtccacccacccctgtcgattttgtccgccaagtattagacaaaccattagacagtgaattagaccttgggtcgcgtcagcgtgttagctcaccaacgcgcgcgcgcgcggcggccgagccgccgaagccaaagaaacccataccaccaacgcctgaaccagcagcccccgcttcagacagtcctgtgtcagcgcacgctgatgaggctgccgagttggcgtggcggttcgtggggtggtgtcctcagctggtaggggcaccgaagaaggtgcgtggccagctccgtcagctggtcgctgccgagatccgccggaatccgggctggctggatgcgccagcgttggaggttgttgcccagcgggtacgtgctgaaggtgcgctgggggtccagcactgcgagattgtgcgagccgagctgcacggggtgatcgccgaccagaaggccgcccccgcccgccccgacgccctgcacgcgcgggagcccaagtggtgggacgacgtgtactacgaaggaaacacaaccgtgtggtacgactctgacgaaaccagtgacgacgacgaggcgtggaaccggtcgcaggtatgtcatgttgctgagcgtgacgacatggctggcgggattgctaccaacctgctggcctcccacgctgatgatccgatggcctggctgactcgccgtcaaaccatgctgatggctcgtttcccccacgcccagaacgaggtcatcgcgatgtgccacatcgtgcgcaccgccctggaggccgacatggccgccggaacccggtgggaggactgatgagggtctcccggcgcgccctcatggccgtggcccgtgccgacgctgccgcagcagaccatgccaccggccgatgggtggccacagccaacgccaccgtcgcccggctgaccggactgtgcgaacgcaccgtccaatacgcccgcgccaccctggtccacctgggcctgtgccgcgtcgtggccaccggccgctacctcaccgccgacgagcggcgcatggctgctcgcacccatggcggccgccagatgcgcgccgcctccacccgcgtcctcaccatgtcctgcgcaatcgtttgcgccctaccccgaaggggtcaccactacaggaaagttaagttcctagatggtcaccaacgcacgcgcaggcgcgtgcgaaggccagcaacaccagagaagaaacccctgtggctgcaaaaactcgcagccctcctcgaccagcacctgccctggctggtgagaaaccatcacatcggccgactgtgccacgccctcaccgccctgggcatcgacgaacactggcaacccgcagacctcgacgccctcctcgacgccatgaaccgcaggaaccgtcgcctcggcctcgacgtgccatgcgccgacgaccagcacaaccccttgggactgttcatccaccaggcccgagacaccctcacccacgacaacccccatgaacgccgcctggcccgcgaacaccaccgcgcccaactcatcgacgaccaactccgccgccgcgcagaaaccgccacctgcgcagcccgcctcgcagccgagcacgccgaccccgactaccagacccgccgtcgtgaacgcagggaaaccctgcgagccacactcagggccgcccagcagcatgtcaggacacactgatacccgctcatacacacaccgtgaaacacgacaagccacctgacagtatcagctgcaagacgcatgacaacatagaagggcatgatgaaatacacatagacacaaccccgcacagcagtttcgcaacaaatcatgatagtctcatggcagtatcgcttgatacacacatagcatcactcccacataggcagttatgctgatatactcctactaggttatccgtccaacatgctgagtgggttcctgtacagcatgaaaggagcatggcatgatatgggccgttctcaactgcaagggtggtgtcggcaagacgaccagtgccctcctgcttggcggcagccgccgccaagcagggccacaccaccctggtggccgacgctgacccccagggcaccgcatcccagtggtcagccctggcaaccaaaaacgacgaacccctgcccttcccggtgcaagcggtcaacatcgccaccatggaggcactgcccaccaccaccgacgcccatgatctcatcctcgttgacacacccccctcggcaggcgatctgatgttccaggcatgccgcatcgccgacctcatcatcatccccaccgccacctccggacccgacatctcccgaacatgggtcaccatggacgccacacaaggcacaccacgcgcgatcctcctcacccaaaccgaacacaaccgtgtcgtctaccgccaagctcgcactgccctcgccgccgacgacaccgtcgttctcctggaccacgacatcccccgccgtgaatccatccgcacagcatggggcaccaaccccccagacgacgtcatcacctactacctgcccgtcctcaacgaactcatggaggccctgtcatgaccaccaagaaaaccgacccattcgcccgccagaaagcagcagaagaccgcgcccaccaactccaagacgaagcccaacgccacgcccaccccaaacgcgtcatcggccccaccgcacgattccagttcgtcctgccagccgacgtgctcaccggcctcaaacacctcgccctcacccgcggcaccaccgcccgccaactcaccctcgacgccctcgacaccgcctacggcctcgacaccctcgccaacagcgggaagaaaacccacccatgacccgtgggtccccctgccaccaccccctcgacggcaactgtgtgcgagccacaggcccgcacacaggcggcagcccagtgccgtccccgccaggaaaggaactgaacttttctggagtgctggctccctatcaccccttatggtgctatcagatccagtagcgccagcccgagaggaaacccatgagctacatcgtccgcaccggaaatctagccggcacccccgagctgcgcgaggggtagccgacacggcggaccgtgcccctgacagtaagcggcactactggagacatcaccatgaccgctcagatcctcgccccgtgcaaccagaaggctgccgtcatcgaaggagccctgccatgaaccaacctaccccccacaaggccgacgagttacagacgagcaacaccacgaggaagtggcggcacaaggtgtcgttctaccaagacccggccgacaccgaccgagtccgcggagcgatcctccacaccatgacaaccgaaggcaaccggaacctgagccagttcgtcaacgatgccgtcatggccaaggtgaccgaactggaagcaaaatacaaccacggcgagccattccccgccgtgggagcccgaggactcccccagggcggcgcagccgccaacagataagagggcggggaccaccaatagcagtcgatttcggatccagatcgggtagacaggacccatgatgaatttcatatcctccctgctctcggccatcctgaccctctttgcgatggtagccgtggcgataggagtggtgaacattgtgccgggaatatgcgccatcatcggtgcacggaaatacggcgaccaggaccgtgtgcgggcaggacaacgaaagatccttcttggtgctatcgccttggtggtagcagtaggcattcacccgtgacccacggttaccggaagccccgccgcaatcgataccactgtcagtaccatcaggggcgataggggtcaagctctccttgtcacaatcccttccccggcagcccagtaaccgtcgcttacagccatacatggatatgcgcccattcgtcggcaccgacgccgtgcgggttggcgacgctgacccgtctgctcacaaacgacccttccagcccagcaccacccactacaccgacacgatccacgaagctgaaaccgaacctcccatccccgtccgaaacatcaacgaactcatcaaccccaccaaccatgcatgaacgcacgatcgcctaccggccagccttcctgcgcgacgtgaagcggctcaaaaacaagcactacaacatgaacacacactcaaatgggcggtaaggtcacgaagtcgacgtggctgcctcacggatggcttcggcgagctcttggggtcgactccacatgggccagtggccggttggcagatccatcgcggtgaagttggtcaggtgcgcgacggcgctgaacatcggattgcctgctgcggccagctcgaggacctggacgctgggaatggagcagcagatcaacgtggttagtacatcatggcgagcgctattggacagcgcgacccgtgcccgggccacttgcgcgggttcaggaaccgcccgtgcccggaaccggtcaaggtgctcgttgctgaggccctctaaactggcctgcttgccgagagtatcgaagtcaggaagtggcagctcagctgtttcctcaggtagatctggtgcgaaggcacctccatcgctcatgggaccggagtccacccagacgatccgatggaccaactctgggtgcctgtctacaactaggctcaccggcccgttcgcgccactgtgtcccaccaggaccgcatcgccgcccatctcgtccaggatggctgagatggcgtcagcttggtcgtcgagcgtgcgcgtagtgcgctgggtgtcctccggatcgaggccaggcagcgtcagccccacggctcgactgccagcagtgttcaataactcgactacctcgtcccaagcccaggctccgagccagtaaccaggaacgaggacgataggccgatgctggtcaggtcgcgatgttgaagtcatggagacatagttgcacagtgcgcggacaagggagtggcactatttctggcatgaatttagatctgggtgtccggtgaggcgatcagaacgcctccatgtactgtccgagtgtctacgatgcagcggacacagtcgagcagctggctcacaagtttccaggtgtccttctgcccctatgagggaagtcggctgctctcgcaacctttgagggctgctctggggtcggaaccagttacagatcgttcaagttccgggaactaccgccggtcacgctgattgattcccgggcgatctcgcttctgacgacagtggtcggtaaccgagaggcgtcctactctgaccccgctgctgcggtgagtaaatcacgggcgtcccggatccggccacccgtccaagtgccagccagcttgatcggctaggcatcgtcaaggagcgacgatgaggtgatgatgcgatgtgagcgcaccgcgaagtgaggtataaagaagccttcccgggcgcatgcgtcgcccaggaaggccaggttggcccctggacggctgaatggttgggcggatcaggctgtagcggagacgtgcagtacctcgtaggcgatggcgttggttgggctctggtctgcatcgtggctactgagttcgacgaggatgacggtccaggtggtgatgtcgacggcggtgacgcgggcgatggtggaatcagtggatgctgcaaggaagtcggcggttatgtcttcgatgcagtgggacggagcagtgctggtgggcaggggcacggtcttgacggtcaggcttcgggcagcagagtaatcggcggttccgttaacaagctggtggacggtccagtcctggatcgggtgccggccgaagtcgcgtacgatagccgagtaaccaagttcgccccagcagaactggcgcatcccctctatgtcgcgccagacgtagaagggcgcgtaggagttctggggtgcgcctttgaccttttcttggatgaggtaggccttgaactccagtccatggtagccgtccatgaggtgtccagtctggatgacgcggtcgcggatgatctgcatgtcatagtcggtgggcagggtgatctgatattgcatggcgtacatcagcggttctccttggtttcgtgggagtaggtcgtgggggtgacgggttcctgccaatcgatggttgacaagtcgttggcggcttgttggtaggtaaggtggatcattggctgtttgagtgcagcgccatgccagtgtctctggccggcgtcgatccagatggattcgcccttggtcaggtgctggggtgcttgtccttcaatatggaccagggcaacgccgcccgtgacgtagaggccctgtcccttggggtgtgtgcctcagcggcaaacgtgacggcgtgggcggcacgcccggcgtcttccgtggcacgatcggccggatccatggcggcgcgcagctgctgttctgcagccaggcgtccaggtcacggcgggcagcatcgacacccagggcagcctcgacggcttcagggctacgacgctggccgggctggttgaccgcagaccactggtgccgggcgtcgtccagatcatggccggcggcgtcgatgagggcggtggtggcttcggcgcagcatcgcctgatccactccgaacgtgacaggccagctgtctcggcggcactgtcatgcgcgccaggagagatttcatgggcgctcatctgtagcctccagataggcgttgatgtagcgcagagcctgatccgtcatgtcgatggcggctgcctcggcagacgacacaacgggctgtggatgataagaccacccaacatagacggcgaacatcaatttctcgacagctttcatgaggtccccggcggcaaccgcatccgcctcatcatccgaggagaaccacttcaggtctgaacggctgtacatagcccctaggtcctgatgtgggtcgaggtccttggaatgatggaagttcctacacacccatcgccaaagacctcaacatggacaacgctaccttcaccactccctcatccgtgaagagccagtttatgcacggtgttgaaagaggcgtcggtctacgacgaatgcgggttaatggtcttgcggtgtggggcgctgggcgatggcatcgagaacgcgtgagtgggtggcgatccattcggccgcgtcggggttgatgttgcgggcgacggtgtcgatcgctgttacgtagtgggcaagcctgcgaatctcagcttgttggtcagggtgagcgctgatgaggggctcttgatgggaggcgcggttacggacgtggcggatgagctccacgttttcctcgaagtcgcgtcggctacgccccgggtagtgaggcatacctccgttacgtaagtcagtgagagctttccatacggttgcttccaggcgcggggtgagcagaaagcgccagttgtccagtgacagactcgccacgatctgatcaggggtcgcatcgagcctcgcgcgccgcagtcgcttctcggccctgtcgacgttacgcgggaaaccaccgagccgatagctcggggattcccaccaacgccgtatgccagtatcggcgctcaggcgcacgtcaatgaagtttctcaggagtacctcgacatggctgatgtcttccaagaacgctttcgagatgcgggtgttccacacgtaccacgcatcgactggttcgatccggtagcggctgagcctggcgggtgagaaccactcctgcaacgtctcacgactcaccgtgggagcgtggtaagattgatgacgataggcctcgggaaggtcaatgccgcgaaatatcggtatacccccgaggtcattgtcttgcccaggcccctcctcgcatacttgcggggcgtcattggctgccgtcatctcgtctcttcccggtacgtggctgtccatgttcacgggcaggtacggcaatgaggttcccgcacacaaacctctaccaagcatacgctggcaagccgttgcatgagacgacgcctccgcccgccacaccaacggtcaccgccacggccacggtgaccgtgaccgtg

SEQ ID NO: 200 - DNA, 7612 bp, Propionibacterium acnes
  source 1..7612: mol_type = genomic DNA
ggttggactctgcacccatttcagccgggtacgttgccggctgggcgaaggaagcagacggcgccgcgattgaagctgccgccgagcacgtcgcgaagacctcccacgcgattgccgaggcgttgcagctcaccgcacagtgagccccacggggcgaccggctcaccccggtcgcccctcaccccccgacaggggaaccgttcccgccgcctgaatctccatacccctgatacgtactacgcggggtcgaggagtggactccccccgccctcgtgtagtacactgtactacagatgtcttaagaataatcccgaggtgacgtcatgagtttttcgatccgtttaaccgaccatgagcgccgcttagctgattcctacgcccgcctgcactcgcagtccctgagtgaggctttcaagcaagccctcttcgaccgcatcgccgacgagttcgatctgcaagtagcccgtgaggcactcaccgactacgcccgcgacaactaccagtctcgccccatcagcgagctatgggacgagtgtgacctatgagctggcagatcgaaaccacgagccggttcgataaagaattcaaaaagctagaccgctacacccaaaaactcattcacggctggatcacgaaaaacatcgacaacaccgacgatccccgccgccacggcaagcccctcaccggtgatctttccggactgtggcgctaccgcatcggcgactaccgcctcatatgcacactcaacgataaccgcctcaccatcctcgccctgtccatcggtcaccgccgcgacatctaccgataagccgttgcaagactgcggcgtcgacaccgccgggaccctggcccaggccttgggcctggaggaggacgagagcgaggagcacgccgcctgagcggtcgccggcacttcccataacagcaccggtcccggcggcccggccccgcgtctggtgctcggaccgatgccggcgcctggcctccgacgcccgccggggccagcggctgggctacctcgacgtcgacgtacaacgggccgaacgaaccgtgcgctgatttaccaccgcttttgcgctgatttaccaccgcttccgcacagagaacatgcctctgactaggagaaatgacgttttccacagggcctctattactaatatccctattatctctatccacgcgcgcgagcctcagcgttcaagcttcaggtcttgctcgtctccctcgcgcctcgctgcgctcgttgctactgccgccccacccggcaagccgggtgggttgccatcggaataccgtggaccatcccggcgcatacacccagacggtccaagatccaatccacgctcacccgcgacgccgctaacgatcctcatacaccgtagatgccgttctgagagccttccagacccgcacgtgggtttattgcaccgagacccaaatcccctcagaagcgatcctgaaaccgtctacgccccatttccgacggacgctggacaggctgggcggcttgtctcccgccgcagacatggccctggcatatgcggttgccgactggtgggatcagggattggatcacacggcagacggctggtccaaggcgggtgtgcaggtgcggtgagcggcagacgtgaccggtggggtgcactgtcatggccgggcatctgccgagccaccatgcgggccctggaccaggaggcagcccgctgcgaggactgggggaagacggcggcacggatgggccgtcgggatgcggcggccgaattcaccgagactgcggtgcagcatcgtggacagatgcaccacctcatgtcggcacaaaaagtgtgggtgtcgaccgacatggtgtcggctacactggacgccgcaggagacgtgccgagtttcgaggccgtcgacgtccctgccgccgggctcatgggtttggccagccccctgccgccggttaccctgcagcatccgctgtatctgcgcagcgacgagggtgtgacaaccttcactgatccggttctcgtcgacgcgctgggatggtggatggattctgggcgtgtgcacgtggtgatgtgcacacgcataccccggctgcccaacccggtttatgcggtggcctccccactgacggtggtggagaaaatcacggtgcccaccggcatcgagttcgagaccatggagtccaggatcctgacccccggcggcgtgacaggcgtctcacggcagggcacacgcatgatgatccggttggcgtcatggctgggtgccgcgtgggtgctcatggcgactccgacggtgtcggagccgcaccctatggatggccggtggggaggcccagcaacggggcagacccggccgcgtgatcgggtgaccgtggtcgacatgcggcccatgaggcaggtgcacaccaccaccgaccccactggcaggcggttgacgacccggcatgtcgtgcgaggacactggacacaccaaccctacggcccggcccgcagtctccgacgcctgcagtgggtcgccccattcatccgcggccccgaaggggctccgttcgtcggcaccgacaccgtcaccgtatggcgccgctagatacgcgggcgcggggggttgacgaacgatgcccccctctttgtgttgtgatcagtcgtgatcggcgggttttaggtcggggtaggtgtcgagaatggccttgaggacgaggtcttggattgtggtgtcattctgggctgccttgaccttcagtccaacgccgatgtcccgggggattctggtctgcaacttgaacaggtctgcctccttggttttgaacagtttggctgcagggttggcaacgggctgttcttggcgctggcgtccaaggttgcttttctttcgggcggtcatgacatcatctccaacagttcgtcggcaacatcggcgaagaaggcgatagtttccggctcaggggtacagccgtaggcgcgcttgatgacttgacgcttggggatgacgtgatcgaccaactgcgtctgggagtcgttggctagaaggtcgcgaccttccttgaacagggaggtattcggttcagctttggaaagcagcaccacgcgcggggttcctgcggcggcgtcgtgcgtctcccaggtgcgcgccatgtcgagcccggacgtgtcggtggggatgataaccagatcggcggcgcgaatggcggcggtgatgatgtcaccgttgcccggcggggtgtcaatgatgacaacttcttcgggtccggcgacgaggtgctggagcgtcgccttgttggccggttccacggggaaccccaaggggtcggcgttactcagtgtgcactcggcccaggatgatgctgacccttgagggtcggcatctttgacgcggaccatacggcccgtctcatggagagctgcagccagcaggatcgctgccgtggtcttaccgacgccacccttggcgttgataatgctccagatcatggtgacacctttcagtgaggatgcatatcagtttacctgcaaggagtaaagacggcaagcagttatgccgtttctgcggcaagccgtcttgcatccttggatgtatagatagttgtctacttatggttgtggatcgtggtgtctcgtaccaggatttagtgtgctcgctgatatgcacgactttcgggcggcctgatctggcggtggtgccactaacccaggagtctgatccgcaaggtgtcctcgactttgaggaaggggtctctgctttcgtgttgacctaaagtcaacggccctgggcgatcactgaatcctaataactttgtatccttccctgattgcatcttagcatccttgaattcaaacagggatggagccatgctgttttgacgacatggatgcactggggtttggttgttgccgatgcggagcgtcaggcggcccgggacgccgccaccgccgacacgctgcgggagatcgtgggactgctgggccggggcggcgaggtcccgcccgccaagacggggcgtaagacgaccggcaggccggccccggcccgcaagtcgtcggccacgcagtaaaggcagggatccgtccctacgcagagagcggaggcagatcctgggggatccgactcttcggttccgtgatcttcccggagatcttcccggatcccccagggctcatcctgatacggggtccgccgacggaccccgtatcagtgggggcgctgccaccagtgatggcgggcgggtcggtcggcgtctaggccccgcccgatggtcgcctggtctacctcgcaggcccgtgctgttgccgaggccgagaacgtctgcccacttgttgccgattcagtcccctctccgtctgccatgtcgccaacctttcctatctggcgtgctcatggacatgcccgggcacgccctcgctgctcagaggcctgctcgttccacctctggccgcgaaccgtatttctgctgaccactcctcgtgcgtgaatatttgccagccttggccattcatatttggactactctgcaccagatatcggactgggaaacctcttgcacatctctaattgtcatctattcgttgggcgcgcgctgttagatcgtgatcataccaatcagaagacaaagcgacgcccttttgagcggcttttcgaacgattctagaccgcgctatatcagcatttctaccgcgcggccagagtgctacactaaattcctctctgcaatccttaagtccattctttacttcctcatccaatttctgcgacagcatttttatggaagcatcgcactctgactcatcatcaaatgcctcaattgcgtgcgttcgccattcacggcgcgtattatcgtagccgtaatgaagtattacccaccgatccacagaatcatcgttaggatctacaactgtcatgaatggcccaactctcgctctggtgtattctcaattgcagttcagtgactttacttgaccagtcccggatttagtagacgtagacggagagtaccccgccgggaacttgactgacatcactgctgtaccgtactgctttcccgggtggcaaccatcgtaagcagcatttgccgtgacgtacctagtgctctttctctgagtgccggtaatcgccttatatggtacaggtgggtgaatcgtagccgttacggctaccgatgacacgtttgcatcacatgaagctgtggcgacataattagttgtcccattgacatgatgagagtcgtggacatactgtcgaggatcgagagtgcaggttattgttgacgccgttgttctggtaccagctgctttcgagctctttgttgcagttacagtctgcggccctgaaggttttactgacgcgactgatgtgttcgcgtgttttgcggcagtgctttgatttggttgtgcttgtgtagcagttgctgatgtcgccagtgatgcccccattaccatagctgtgattatggcgtagtctttacgcttcattgcgcccccaaataagcatgttagtttgctattttgaataggatacgagacatcgccatgacttgtcaagggcagaagtagaaagaatcggggggtatcaagaaagatgtgctttcatcaggacgaaagcggatgggtccgttcgacttggtgacgaatgatccggccttgcgtcgcggagaccaggccggcgagtttgtcgagcagggccgccgtggcctcatcgtcgggcacatcactaaagggacgaacaaccatgacggctagggccagaaacgaccggaactgaatcgcatgtggacccccatctggcaccaggcacacacctaccgaccggaaaccctgcaccctgtcgctcccagttcacctcctaatatgcgcctatagtctgtgctagtagacattattttgtgtgttgtttcccatctggcatgtctggccccggacccgccgcgacacgcggtggtggataacagaccaggacccccggaccatagagaccagggggacgagacagtcccccggtgaggatgtctcgatgtgcagatcaggaacagaatcgccgggcacgacccggcgccggtgccggtgcagtgaacccgtggcccatcgactccacgaacgaacgtctcgccttcctcaactggtgttggcggcaaggctactcagcagccatcgtggaaacgatggacgccgcgggagcctacgaccacctcgacgacgaccagaccagcaaccagcacgactaacgccgctcccagcacgggggaaggcggcgcaccaggtgcgccgccttcccccgtgctggtgtctcgtcggcttactggtgggggtcgtaggggaacccgtaggtgtgttccagggccttgcggagaaggtcgttcatagttgtgtgttcggcgacggccttcatcttcagcgccgtgtgggtggcggtgggtagcttgacgttgaacgcggtgatcggggtcttggccgactggaaggtttcagagacactggctccctggctggccgccatttggtcggcgtaacggctggctttgtcggcggcggtgggtttgcggttcttactcacttcagcatctccttgattcggtcggcaacctgggcgaactctcctagatctgttggccgggttccgatggcttgccgataggcgacccgtcgatgaacctccgcatcgagaacgtctaggccctcaacggcggcggccccctcgtgggcatcacggtattgcctggtccaatcggctttgttgaagagcagggcccggcgtgtgccgtgggccacctggtaggtcattagcgctcggtccatgtccaggtcccccgactcggtcgggatgatgaccacatcggcgatgtcgagggctgcggtgatcgtctgagagtcaccggggggagtgtcgatgatgacaaggtcggcgtcgatgtcacggcagcgcctgacgataggggcattagccgggcggacctcgaagcccagcgggtcaccagtctcgaaagcgtcggtagcccatgacgtcgccgatccttgcgggtcggcgtcaagcaagatgactcggtactgagctgctaaggccgttgccaggtagaccgccgtggtcgttttcccgaccccgcccttggtgttgacaatagaaatactacgcataaatacatcattacacatgcgcatcgatgtatctgtatatatgtgtatcggcgtgttgcgaggggaaaccccagcccacatacaacgatcccccagccaccacagccgggggatctctcagtaaagccagcaactcccacagaagttgcacccccacgatacccaccacatccgtgtcaagcccccacaacacccaccagcgccctaggcttcccccatgaacattgacatggacgcaccaaccgaaaccgaagccgacaccttcgatgccgtcctcgccgacattaaccacatcaaccgcctcaccgccgacgaaatcgaggactactccatgggagcctgcctcctcctcaaccaccaccccttctccgaactccgccaacactgggccgacaaccccaccgacgaaaccacgtggaccctctacgggaccatcatcgccgcctccaccctggacccccacctcagcatcgacgccctcgcccgcttctaccaactccccc

SEQ ID NO: 201 - DNA, 4261 bp, Propionibacterium acnes
  source 1..4261: mol_type = genomic DNA
gacgccggccaccccaactactccgacccacacggtgaccccagctccggcctctgccggccactcgaccagcgacgagcacccactccatacggataccgccacagcggacaaggccagcaacgaggacgccctgtccccaatccaggtgggcttgaccgccagcgtcggactggtgctggtcgccggactgatcaccaccctcaaccgccgctaccggacccggttcacccgccagccccgcggcaaggccatgaccctgcccagcccggacgcccaaactgccgagatagcgctgcgcagcaccggggcgactgacactctgacgatcacctgcctcgaccaggcgctccgcgcgatcggcgcatggtgccaccactgcgggcacccgctgccacccctgctggccgcccgcgtcgatgacgaccggatcgacctgctgctatcccaggcggcccccgaccatcccgaggcggtggagctggccgccgacggatcggtgtggaccctcaccgccgaccggatcgacgacctgctagcccacaccgatgacaaccaagcggctccgtggccgtctctggtcacactgggacgcgacgacgacggcgcccacatcctcatcgacttggaagccgcaggaaccttgcacctgatcgccgatgacgaccaggtcgacgcggccctcgccgcgatcgccgtggaactggccacctgcgactggtccgacgaagtcaacgtcaccctcgtcggccaggtgtgcccgggcctagaagacgcactagagtctccgaccctgacccgcgccaccgacgtggacaccctcctcaccaccctagaagctcgcgccgacgaccagcgacacatcctcaccgaaggaaaccccctcgccgctcaccgagccgaccccgccatctccgacgggttcgacgccgaagtgatcctcctcgacaccgaactcaccgaagaccaccgcaaccgcctcgccagcctcgtcgaggctcttccccgcgtgtcagtcgccgcggtaacaaccagccccaccagcccagacgaatggtccctcaccctgacaggtgacccactagccgccgacctggctcccctcggctggcacatccacccccaaaccctctcccccgacctgtacaaccgcatggttgaactactcgccaactccgccgccgcagactacgaacccgccagctggtggaaccacgacgccgacgacgagcccaccaccgaccccaccaacgaggaagaatctaccccgagcaggcgagcccgcccgaatatccgcctgaccaccctgaccggcggcatcgacctatccagcgtcgacatcgacgacatcatcgacgaagccaaccaggccctcgacaacaccgaccagaccaccaaccagaccaccaaccaggttcgcgtcgacaccgaccaacccggcaccgacacccccttccccatcgacgacatcgacccgctgagctccgaccacccggtcctatccatcatcggccaccccgacatcacaggtgccactggaaccgttgggcgctccccgtggcgctgccaacagttggccctctacatcgctgagcatccgggagcatcgggggcgactatcgccgatgatttggggctatcagcgtcgacggtgcgctcgattgctacacacctgcgacactggttgggagccgacgatgccggggtggcttacatgccggcggcgacgcgcggctaccgtctcgatgagcggatcgtcacagatgtggacctgatcgacgctgctgtggccggggcaggcattaacaccgctgagacggccacactggtggccattttgaagctgggccgcggacgggtcttcgctggggttcctgactcggaacttcgccagttcagggcgtcgatgtaccacgtggaggcccgcatcgtcgatgctgccctccaagtgacagaccgggccctggaagccggggacctggggctggcccggtgggcgttgacccaagggctactggtgtctcccgatcatgaggacctggtcaccggttgtctgcgcaccgagtaccaggccggcaacatggacaaggtttccgagctggtcgatcacctgtcggctaccgcacgacgcctgggcgtcgatttgagcgccgacaccacccggatcatcgactccgttattacccatacacgcaggagagcatcatgatctcccgttgcactcatctccgtcaggaaggttcctatgcaccattatcgtcttggtatcggcactgccctcatcgcggtagcagccgtggccggctgtcgctcaacagactcgacacccacaccacctccatcccgtgtctccgccacgacatcagcgagctctaccctcagcccgaccccgtcagccggagcgatcagtgccgccgacgccgaaaacatctaccgcaccgtccaagctaacaagatcgcactgtacaaaaagggtggcctggcacccggggaacccgcacccgcgacactgtcgaactacgccaccggccaggctctcaccgactacatgacctacatgcaccaaatctcggggcagggcatcaaaatcacatcggggaactcctcggttaccgcggtgcgggagaaaaagggtgataccacctaccccgaagccgctatcgccttggaatcgtgcgaagacgacagttcgattcgtaccgtggaccgccacggaaaggctgatcatggacgcattttccatgtcgacagttggtatgcccgcgataagaagggcaccgtcaagatgatcgcattcaactcaacggaggtccccacatgcgacgtcaagtaatcaccgcggccgtactgggcctggccctggccaccacctccctgcccgccctcgcaggcggcggcgacttgaacggcagtgtggacacggatggccctggttacgatgtgcgtactgaggtggattaccatcacaccaccggtggtgcgggtgggggtgccacgacagggggccatcatgggggcaaaacccacggtgatggtgaaggtgaggctattgatgggcgttctcgcgccgatgccgaagccgaactagacgaagccgaccgtaaccaggacttgacttgtgatgtcttgctcccaccggcgccgaataccccagccggccaggaatgggcgaaagaatgcaatcccccagcgaaaaaggggcagaaggccaccccgaagcccgatccggtgttagtgggccgtcacgcggccttgcagctcacccttcccggcgcggcccctcgtatcgatccgtcccccgaccttaaccggtggcactcggcagcagtgggccaggctttgtggttgtcggttgatgaccccaccgccactacgcagaaatcgatcacgtttatgggccaggttgtctcgttgagcgccaaacgtaacggtttgtcgtttgatatgggtgatggtcatgtcgtgcactgtgatgccacgacgacatggacggagtcggtggaaccggggaccccctcacccacgtgcggttacacctaccaacaggcagccccggccgggggctataaggtcaccgcaatcacgtcgtgggatgtgacctggtcggtactaggacacacgggcacagtccacatccagaaggccggtgggcagatgcttccggtcggcgagttggagtctgttgttacacggcgatgactcctgatagtccgacgctgtatgaggtgttggaggtctgccctgatgccactgatgaccagatcaagacggcgtggcgtcgtgccgcgaaagtgactcaccctgatgccggtggcactagtgaggcgttcgcggccgcccggcacgcctgggaggtgttgtctgatcctgcccggcgcaccgcctacgatgccgacctggcgggggaggatgatcccgacgacgaagccgccgacgccttcgacgttgatccgttcacggcatggccctggtgcgccccgtacatcgacgccacccccaccctgcgccacacctgccccggcacgatcaaggccatcgtggtcgccatcgccgggatcatggccggaatcggctggcaggaagcgctggaggccgtggtgtcgccgccggggtttctgggggcgtgctggatagtctcagtgccggttgtcgtcgcagtgacatggctggcagcggtgacgggtctggcatttttcaccatggcggccatctggtgtggatggtcgttgataggtggtgcgttgctgtggggccagacgtc

SEQ ID NO: 202 - DNA, 12448 bp, Propionibacterium acnes
  source 1..12448: mol_type = genomic DNA
cccatcgtttacatcctcgactggtccctgcgaccagtgaaccgtgcccccactgcgcccacaatgatcagcacacccacggcgatcatcaggtgggcagcactaactgatcccaacggaccaagatcaaacaagccctgcccgggagcgtcgagcagtccgtgggcgcgaagccatgctccgagatgaccgatgattttaggggccatcttcttcagcagggctatccctccgataccaacaacgatgaaggcgaggatttcttcgcatccgttgtttccttctccggtggggccgttcatgctgccttctcggggtggacggccagccagccgatgaggttgtcggcgatctgccctgagatttggatcagttcgacttgcccggcctgccatgcccgcgatgcgccggccagcaatgatgctgggacccctactgcgcggccacgggatgcaacctcagccaaggcggcgcgtaactcctcgacggtgctttcgatgtaccaactgccgtcagtactagtctcagcggcatcggtggtagcgataagagcatcggtgaggtcgtcgacggcgcggtccagatcagcgatgtccggtagggctacagcagtcatggtgtgtcttccttctagggtgccttcactggtgaagggtccctagccccggccgatgtgcggtgctgtgggaaaaatgcttcccattggtccgtcttagttaggaaacttggcctaagtgctgtcgagggtcgcgtgttcgtgaccggttcgaagacactgccgctttgccttcttgtcagtggcgtttccgagatggggtcagtgggcgatggctaggccgatgagggcgccgctgcacaggctgggtgcccaggggaggaatcgggtggtgtggtgtcggaaccggtcgattagggcatatagggcgatcagggtgaggccggctatgaccgtggcgtggatcgtgtcgatgccggttgctgcgaccggggctgcccacagtggtgtgatgcgcacgtcggagaagccgaagccgcctcgggagatgagccaggcgatcatccacgctgcgaagatgatggtggtagcgatgacagcacgtgttgccgcagtctggtccgagagggcggtaacggctacagccccgatccatccggcccatccggtccacgctagggctgccggtatccatgtggtgatggcgtcaatgacggcaacccatgccccgatggtggctagcagggcccacgtcggccacgtgggtgctggggcccacattgtggcggcgatcatggtgaccgcagccgcggcacagaccgcgatcaagcttcggagactgtaggtgtcgcggtaggcgattttgtcgggggtggcggtggccggttcgggcaggatgcgagtgagggagggccatcctgcggtcgcaatggtcacgacggcggcgatccacacgatctggtgcatgggtctcatcatggcccaatatcgatgggtgtgggtggccgacatgggctcagtcgtcgagaggtttgcgggcggttgtggcttcttgggtgccgaggatgagggtgccggagtcgtcgccggctgattcccagtcgacgatgacctggtcgccgtcaacgctggattcggcgatggtcacccattgcccgtccatgtcgatgagcatcccggcggccaggtctgtgacggcaaccgggtggggtgggctgtagaggaggtcgatgtcgcgggcagggtcgtcgggttcttcggttacctcgggtggggtcgatctggctgtctcggtgtcgtcggccaggtccgctcccaggatgcgttcccattcggggctggttttcttgcccgctgaggccatcgtctcgtcgatctgttcgtcagtgggccacacaaatttctttttggtccaggtcgtggtgtcgggtcgcagctgatccagcagttccaggtcttgcggggagtgggccttgcgggggtcgggggtgtagaagaattggacttccttgggggctgattcgccggataggtaggtgcctcggccgcgtttgccgaacgggatgcccacgccgatgtgttcggagccgaacatcatgcgggctccgtcagcggacaggggtccggtggcggcacgcccggagaagttgtctcggatttcgccgcccaggaactcggcgtcggggcgttgggtccccagatcgacgtggatacggcaggcggctgccatgcgcagcagggagccgatccagccgaaaacggggcattctccgggcatcccagagaccttgatcgttgaccaccagtttttcgcgttgccgtagaactggcggtactcgtcgatgaggaccagcacgcgggtgaagtcggtctcgcgggccccttcttcttcgatgcggcggtagcggtcctccatgagagaccacagccagtggatgagggcgacctggtcggggacggtagtggcgaccatctcgatgttgggccactcccgcaggcccaggtactcgatgcgtttagggtcgatgacgaagacgcgccagttgcggcgggcaccctcgacggcgtcgccgatcatggacaccgtttttccggtacgggtgcggccggccttgagctggtgggccatgacaccggagatgtcccagaaacaggtgttgccgtcctcgtcgacggcctgggggattttctcccagtctggggagtctgggcccggaagggccacgggtcggggcaccatcgagggcagggggtggcggcgggtgacggtgatggtgtcgtgttccaggtcgaagtcgctgcgccactggccgagcatcatcgccgaggtcaccgcggccaggcgcaattggatgttcgggctggacaaatgggcgccacgttggtggtgaatggtgaagccgtccaggttcccccgatcggttttccaggaatcgacggtgaccgccgacccatagatctgagtggctacttctttagcccgttccttgtctcggtccagatcggttttgtcagggtcaggggtcggggcgcggtattgcaggacgaaccggccggccgggatcgttgcggatgtcaccgtgaactctgccggcgaccaggcagccgcggccgcctgggtgagggccattggcatggtctcgacggcagcctcctcgggggggatggtgagggtcaggcgtcgcggatgcgtcttcttgcgattccatgtgactttctgcttcaccggcaccttcgccgccgactgaatggctaggcgagctgattcggcagtttcggtacgccggccagcgcgtagcgcccgtcgtgcgtgaaggctgcccaccacagcacagcccatacacggcagccaccagcgcggatcagcggctgctgcatagcccccggtagctagtaccgcacctgaccagccggccgcgatacttttccacgccggtttcgcgccaccaggaccagcgttatggacggtctgcttcgaggctgcggagggacgagacagcggagtgctggtcatgccgcggcctccttgtggcaggtcatttcacaggcatgccggccagcgatgatgccgtggcgcaccgccccggtagccgcatagaccgcgcacaactcaaacacggggcacccatcgcaggccgccgggttcatgctttctttgtcccacgatggtgggtcatcggtgcacggcacggccaggccatcctgttgagcggcgctgatagcggtgaataggcgcagctgggcgcgaacttggtctggggtcaggttgacggtgcgggctacacgcatggggttccttcctcttcaccagtgaaggttccctagacccggccgatgtgcggagggatttcagtgttttatcgaggtgaccagccagccggtctgcgctgcgggttcaggtaccagggtcagatgcagcatggtgtggtcggctaggggcacggcgaccaggggcccgtcggcgctcgccccggtgagggtgggagttccggccacggtggtggcgggaatctggttgggtttcgcggccatcagggagcccatgagggtcggggcggcgatctggacgagggcgactttgcgggcggcgggatcgcgggtcaaccagccgcgggtgaaggtgagcgcagccgacgtgatatcggggctcagcggggctggtgtggcggcggggtgggccgttgaggagggccatacgcgcggtagcgctggcgacatcgagcgggtcggagtggggtcaggtgtagggcttagggtccgatgtggcgatggggctaccgccccggtggtgggagacgagactggttgggggtggtgttgagggcgtgggatcagggtgaaggcagccaaactggccgggatgaggatgacggccgcgccgacacttcggagcgaggtcatgtgacgatccttcggtagctcgacgggttgccgtagatcttttccacgttgatgccactatgtgggttgtcggcgctaaccatttggcctccaccgatgtagacggccacgtggtgggcagggcttccccagaggatgaggtcgccgactttgagctggtcacgggccaccgcggtgccgactttctgctggtcggcggcggtgcggggaaggctaatgccgatacgccggtacagcgccgaggtcaggcctgagcagtcgtagccgccatcggctttgccgttgccaccccacacgtaggcgtaggagttgttgtcggcgatcgatttggcccatgccacggcttcggccaggttcttcgacacaccggtctcgttagcggccccggtggcacagttgtttgacaggtgccctgtagtagtggatcccactatttgtttggccatggtttcccatttggcgtaggcatcgggcagggctgagccttgcactgcctgagctgcctgcgtcagcggcatcttctgccagtcagcgatgtcgactaaaccgggaatgtggaatccagggccgccggccgatccggggccagcgtaggtgatggtgtggcctttcaagaacgcctcggtggcgtaggcatcattgttgacctgatccagagtcccgtaccagcccggcaggatgcgctgctgaaaggggccggcgtcaccgtcaccgttagccttcgctgaggtagggtcggccccaagatctgattcttgtttggcggtcatgatagcgatgaccgctgcctgggtaggcagtttgtcacgctggaccacagtgacgatggtggtcacgagctgcttctgcctggccgtgaggcctccggcacccacagtgcctccggtgacggtacccacgcaagcatccccgccgacactgccaccgccgccgccagagttgtcgtcgagggccccagagcctactgacagcagcggcacaatgatcacggtcgcgggcaagaccgccaggcccgccagcatcagcactgctgcactcaccacggcgatcacgtgagatgctttcaacgctgcccacctttcgctggtttgagggggcgacgcctgctggtacgcacaggcttggttggtccagtccgccgttggttggcaggcctgggtttgatcggcttgctgggacccggtttgggctccggagtcttaggctccggcttcacatgcctaggcacttcggctgcggtgggaggagtcagcacgtggcgtaccggcttggtgaccttctgggcacccgaaacaaccggcttagacaccaccttggcacctttgaccaccggtgcggctgccttcgcgccggccttcttgactgcacgatgcgctttgatagccccggcctcggcccggccaaccctgctagcagtagcatcgagggctctgtggcccgtcgttgccctcaccggtgcatccttgccctggcgggtctgcttagcgatcgccgacatgccgcctcgcaatgccgaaacatgattgtgggcgtgggcgatcgccgacatgccggccgtcgcgatttttgactggccctgcggggcccctgccccagcacgaatctgctggtaagccgccgacgtgccacgagcacccgccgccattcgcgccaccttcgcagccctagtcactcccgtcgacacgccacccgtggctaccgcagcagcacccgagaccacagtcgaggccatccgccttcgacccaatccggtgagcttgcgaccaccgctgcgcaccatccggcgagcaccccgcccagcccactggccaatcgccgacgccccttcggaacgcttgctgcgcatccaatcgttgatcttgtccctcagccccttctcgcccttgtgacgacgccacatggacatcaagaacccgataatccccacgagctcgagcatgttgacaaccatgaccttgatggcgacatcaccgtcagaggcgaaaaccgacttgatgatgagcatgaccacacccaacatcaccatcgacccgacaatgccgatcatcgagtacaagatcgaacacagatcccggatgagcggatctgtgcggccagggatagcccgcaacacgttgagcatcgacatgaacgccgaccacaccaacttgcacacgtagaaccagcacatgcccgcgaacaccagcaggaccacagccaaacccgccaccgtcgacgagtaaaagaagaaccccaccaaccacgaaccatccgcaatatcgccggcgtaatccgacaacccctcatcacagtcaccaaggtcgtcgcgagcatccgagacgtcatcgtaagggccacccttgagcacctcgatgtacttgtcgtggcacttcgcatcaataatgcggccatagttgagctgctgatgaaccggcgccacgaacgagtccacaatgatcgccgacagcttcggatccttcgagtctcccgtcgaggtcatgtcatcaggaatctcgacctcaccagcggtcgccgtcgcaggatcaaccgaactggtaatcatatgagacagcgccacaccgaactgctgggtgcgagccagcggagtagccaacgtcgtcgtatcgcctgcgaacttcgccaccggggccgccaagaaacccaacgccagcgccgcagcaatcgccgcacgcgcacccgtagcccacgcccctgccgtacgtcccctcatcatcttgacgaccacgcccacaccggcgcacgtcgtcagcaacgtcaacaccgttccaccccagctgtccgctcccagcggggccaaaaccttgtcgtggatgtcgttctgtaaccccaccagcggtccggtaatccacccgacccagctcatcgccacggtccagtccaacaaccggcacaacagggcaatgaccatcaggtacgtgttccaacacatgccaataatggaggcccacatagccttcagcggggccgtaacgccaccatcgtccatcgacatctggtactgaaacaagtgaataccgttggagtcagtcacattgaaaccgtcacccatccagcccagccccgggcccgatgccatggcaggcacactgctcagcgccaccaccagaaccagcgtggtgacgatgatacggaaccgccgctccccggccccggggcggcgtggatgacggctcacgctgtctcctggtcgtgctcgggcgggttggagctggcggcttcgcggtggggagcgtaggcaggtctcagtagtcgaatttcaccgacgttgccgtgttggtcggcgtacaggccacaaccggggcctccggggttgagggcaatcttgaccaggtcagcgaactcttcaggggacgttttagggtccacgcccaggaactcgacacctttctgggcgaggttgatgttgtcgcacagcaacacgatgcgatgctgaatgaggttgcggacggtctcgttggggtaatcggcctcggggtcgtgggagccggtgataagccaggcattggctcggcgggattcgcgcacgtactcgtcaatggcgtgggaggcttccggcgaggacgacatgtgatgaaactcgtcaacaatgaaagcggcgtcgcgggcccggtcgctgaagcacaccaggcgagccagacgggcaatgagcgcgtagagggctcggccaaacaccttgtgcgggggcagctgccgaaacagatgttctgacagcatctcctcggcgttaggaagagcgatgccacaagtgccaatgatgaggatgtcggcactcaggtcggcgggaggaaggtccgggtcaaagatggccgaagctagggaggccgagttctcgatgtcagcgaacacggcaatcctgtcagcgatcgcggtggcctcgggaaggtcgcactcctcggccaggtggcgggccaaacgcccacacgaggtgatctggtggtcacgcatgtaggccggtttgaggaccttggccagcgtggtcccggccacaccgatggtctccaagttaagcaaggtcagcaagaacgactgggcgacctgcccggccatctccgggggaaggatgcgcagcgggtccagcgacagcttggggtgggccgtgtcgacgatctggcgtctaaccccgtcgatagagttgacaaaggttacccactcccgctcatcggagttgtcggtggcaataatgcgcccgccccgggccgcgatggctgcgcacagccgcttctcggccatcgtcttgcccgcgcccatcttgccgatgaacgccaccgtgttgcctttctgatcctgagtgtcggcatgcaaatcgaggtaggccagcgactgcaacggggagcctgtgaccacagccaacgggatgccggtggtacggcccaaccggtactcaaccaccgggatagatgcggcgaacgcggaggcgtgagtcagctgacggtaggcgttaagcgaggaggagaaccggccaccgggccgggcagcccacagcaagtcctcctgacggcccacgggacgcacccacgtgaagtcaccgaacaccggatcattgacgaacgctcctgccagctcctcggtggtctcaaagtcaggagacgagacagtgacggtgataagagcctggatctcgacctcacgctcatcggcggccagctcggcgttgtagtcgacgagcacctgagcggaatgctcgatagacatgagggtcgaagcctgggtcatctcaccgccctcgacgttgtcgagctgatcgaccgtttgacggatagcccgctgatttttctgcatcgcagcgtgacgggtccgggccactccccggatcgccacgtcgaccggcacgccagtgtcgtcgatacggcccaaaaactcgtaggcaggccacgtcatcgtgcggggcaccttacccagcacgatatgggactggtagacggtctcgccggtgtcggcaccgattttgaggacgcgacgattccacgcctgagccgtccgggacatgtgggagactcgcttgtcatcctcgctggccagcaggtcggaggtcgcggcctcatcgatgaccaactcccccagcgcggcacgtccaacctcatccatgagggcgattccctcgccaggggcatcatcacgcaaccgggtcgggtggcctgacaggtgctgccgaagccagatctgttcatcaacggtgaccgggcggggttggaacgctgccggcagtttcgcaccgaattccttagcctgacggagggcccactcccgtgcgacacggccaggagcggtggtcatgagtccggcggcttcggtgattttgttgagggcggcggtccaggcggtgtgggtgcgtattttctggtcttggttgagtttgatcgataggaaccacacgcgccggcctagggattcggtttcaggctggtcgagggtggcgtcgatttcgtcggcccacacggggtgttcgctcaggtcgaggccggcggccatggcgtcgacgatttctgtggggtcggtccaggtgagggctccgttgaggcagaactcgtggcgggcgaggtggcggaataggtcgcggtgagctgcggcgacggtgagggaggcgttctcggtgacgggtcgctggaggggagtgagtcgccaggtggcccagatgtcgccggtggaggtccagacgaggttgtcgaagaggaaccgttcggggatggacatcatgactccttttcggcggcggcgaggaaggcttccaggccgctgcggcgtacagcgttcccggtagggtgcaggggttttctgggggtgggttcagatttcgaatgtgggaggggtttgtggatggtatcggtgtcctcggcgagggcttggtcgagcaggcaggtggccggggtgtcggtagtctcgtccagctcgtcgatcatctcgtcgaggaggttgggggtggtggatgcggcccacacaggtgggatagccggtgcgggtcgaggcggtgtggggaggcggagtttggtttggccccagaggggtgtgtgggtcatgccggcgggagtggtggcggcgtgagtggtcacacgccaccagcccgccagccatgccagaggtgaccaggtccagtcgatgcgaccaacaacgaactgggcgagccatccggcagccagcgcgaaaatgaaaccgcggatggtcatgcccccgtcgataattttgaagcccatcattgcggcaggaactacgccgccgacagcgagcacctgatagatcgtgtagggcccgccaggaatccttcgacctgaggaatccttaccgataatgcggggctgctggcgggcctcggtgtgccactgaatatccacgatcagctcttgcccaatccttgcatcatctgtccgaagaattggatcgcgttaccttcgataagccagtgcgccataccacacacaaacagcatggagacgatcttggccaggctcataccgtgtttgaagatgttgaacgcggcaatgcccacgactacgaccatggcgacggctcgcaccgcggactgaccttcacctgccttgatcgtcgtccattcgaagaggttctgcgattccagtggcagcaggaggaattgatcgagcatgagaggttttcctttcaggaagccgaccgggatggtcccggtactgacgggctggacggcacgggtgtgccggccaggggcagaaggcgtgacggctggtcgagggaggcaacctcccagcggcctgcacggctgacaagagtcaggccgtactggctggtccgggtagtggattcgtcgccggtgggctggcatgtcacggtcaccgtgacggtaatcttctgccggtctgagggggtggggacctcgtcaggtcccaccacatgagtggttttcactgatacgcatggggctgggtcaaccgcggtgaaagcggtccctgggctgctccatctcgacaggtcagtattcccggtcagcatggcggttaggaagcctgaagaggcttgggcggccgggtcggcggtgcgaagctccgaggtgtctaaggtgggggccgaggccggtgcaggcatggggatctgtccaggtagacgcaaggcgatggccttgccgttggaatcgacgtggaccgggactgaccaggcctgtccgctcccggattggccgcccatggtgaccacggtgacctgccacaggctcggatcagacggggagacggtagcgtcataggcggtgacggtggtgggcgctggaccaggtttgcggggcatgcgcgcatcggtgatcttggccgccaccaggtgttccagattgtccaagtgcccggagtcagaggtcagcagaagagtagtcacctcgaccgcggtggctgaggcgatctgagctgtgcggcggtcgtgatgggtggtgtcagtgctgacagctgtggtgggagcggatgccggggccgccgaacggaccagggcaacggggccgcatgcgactccgcacagcacgagggcaaggaagcctttggtggccatcgatccggtgtggggccagggacccacgttttcctgtgcctgttttttcttggccgaccaacggcgggacttagggttagcggatgcaccttctggggtgcatgctcgtctcaatcgcatcggtcacctccttcactggatgaagggaccaaggaggtgaccgatgtgcggtcgaacccgaaaaagttcaaacttttttctgggtctgcctcaagtacgacagaaggcctgcatcatcacggcgttgtggtagcagatcttgcgtcagcgcaaatgtatgggcctcgtaggagtagctcttaggtgggtcccggtggttgcggccagggcgagggtgtcgggtatgtgtagcgctagtcccgggttcgtggtgtgagggcttttgggtgctgacatgcactacccattgctagacgctgtgctgtggcatggctggacgtctagcagacgggttgacatcacctttaggctggcagcgcccgaggccgcaggccagaggaagcggacagcctaacgattgacgtccccctctcctttccccaacctcctgga

SEQ ID NO: 203 - DNA, 9476 bp, Propionibacterium acnes
  source 1..9476: mol_type = genomic DNA
tgtgtgggatcagctgtgccgctcccccgacatggcagacagcaccgttgcatgagaactgactgacactgtggcgccgcggaggtctcccgcggcgtccgctggggcgagtgcatgcctgtcagctcatcttttatcgtcatgtttccccttgtcagagcggtctttgcaaagtgacaacgtcaggggtcttgacgacaacatcctcgacaacatcgtggcggtggtctgtgtctcgtcagttcaacgcaccggggaaagaggcaccgctgatgttcaccaccacaaacaccctcaacgatgagtgggaccagattcgcgccactgagatcgattggcatgactgccctgaactgatgcactgcatcgacgttgatgatgtgttggccgtcattcctgccgcccccgacgccatcttgggctacctcattgcccgggctcagggcggtgacgagttggccacccgcactatcatccaagcgttcacaggcaagcttatcttgatggccacggccaccaaggtgcgccgtactaatgacggcttcaatgatctgttggcgggtctgtgggagacgatcatcacgtacccgttggatcgtcgccctgacaagatcgctgcgaacctcatcctcgacacgttgcaccgggttacccggttctggcgtgctgattcccccgatgaggaagaggctcacggtctggtgcccttccctgacactctcatcgccccagagcccgatgaggacgtcacagctagccaggccatcgccttggcggtggaccgcaactggattaccgaggacctagcccgcctcatgagccatatttactgtgacggtatgactggagctgatgcgggtcgtctgcatggctgcgctccagctacggtgcgatctcgatgccgtgatggtcgggccgtgttgcagcgcaacgccgagacgatcctggccgtctgctgatccctctcttgctcatgcctgccgccaccctacccctacctgctagaaacatagccatgtctccagcaacgcatctagcatatcttctagcaattgatctagctatgtatatagctgatgatctagctatcatatagctgtgtctccagcccaaaggacagcccaatggcatgcttgccacaggaaggtgcgtcagcctcccgaaatactggaaggagctttaccgtgcaggacatgacctcgaccagaccgattgaccgatccccgttcgaccgcactattgcggtgtggaaccacaaaggcggcacgttcaagacgtccgtcgtggcgaacctgggatacctgttcgccgccggtggcaacaaggtgctgctggtcgacatggacccccaggccaatctcgacattgacttcggtatacccgcgggagaacgtgaacggggcatgggattagccgaggcgctacgtgaggggacggcccttcccccaccgcagcatctcagcgaaaaccttcacctggtcagtggcggcgctgctctcaacgagttcaccgaccccgcatccttagcggccatcctcgaccgagtcaccaccgcacgctacgacctgctagctcaggcccttgccccgctggcctgggactatgacctcatcttcatcgactccgggccggcacaaactctgctgtcccagaccatccttggagtagcccgctggctggtagtgcccacccgcaccgataacgcctcaatcactggcctcgtcgacgttcaagacgccatcgacggggttgcctcctgcaaccctgaccttcaactactcggcgttgtcctagccggcgtgggggcccgggccacccggatcgccgcagataaacgccacgccatcgacacagtgctgggggcaggaaccgttttcgatgcggtcatccactactccgagaaggtgtccgtgctcgcacgccagcagggcaagaccgtcgccgagctagccaacgagtaccacaacacccagcccgcctacacctacctagctaaaggccagaacatccccaacgtcgccaaggcagccgtcagcatcgaaactgattatctgaggctggccaccgagatcagcgaccgcatgttcaccagcgacgagcaggagcctgatcatgactgacgatccgactccatccgagcagaacaaccccaccagcgacgacatgcgcttggccgaagaatgggccaacagcggccgcacagtgggagccctgccgcgccgtcaacggcctcagcgacccacaccccgcaccaccagccaaccccctgtctcgtcccctgacacaccggctccgaaaaaaccccagaagacccccaccagccagcctggccgtcaacggatcaacgtcaccgtctacgttgtgcccgaactccatgagcggctgcgctcccgatcggcggcgacgggggtgacggtctcggatctggtggtgcatgcgttagcgttcgtcgccgatcatgcgggggaggcgatcgccgatgatctgcgcgtcgagacgggccccggcatgggggccggactgttcgatgtgaccccatcgcggccagtaggggtcgccaaaacccagctgggggtgcgaatgacccgccacaacaaggatggtttggaccagctgacccggacgagtggagcccgtgaccgcagccatcttgtgtctgtcgccgtgcgcgactatctcgactccaaccctgtaaagaaaggccgacatgtccgctgatgaaactcctgccgcccggggtgggcgacgctttgatacgaccgtcaagcccaggcgccgtcccatgcttatcgccgccggtatcgccatcgtgatagtcggcgcgctcctcatcactcagttgattcgctccgcccaaaccgagcatcgcgtgctggaagtccacgccgatgtggctcgcggcgaggtcatccgtgacaccgatctggtatcggtgactgtcggccaggtcgacaacgtatcaacggttcccgcagaccagctcgactcactggtcggcaaacgcgccacggcagatcttcgagccggatcactcttgcctgctggggctatcggcccggccgatgtcgttccagctccgggcaagtcgctggtcgggctgaagctagccgccggacagatccctatcggagaccttgctgccgggacgaagctgcgcctgatccagacgtcggcacccagcggctcatccaccaccactgatagcagcaccaataccgatggccagtcgtgggaggcaacaatggcgaccggcaccaaaaagaccgagcaggtcaccttgatcaacgccgaagtgaactcgcgtgatgccgcccggatcgcccaactgacgtcacagggccgtatcgccgtagtgaaggatccgatccgatgagcaccattgttttgaccagcgtctcgggagccccaggggtcaccacgacagcgatcgggctgggcagggtctggccacaatcgagcctggtcgtcgaggatgacacccaccacgccatgctggcgggctacctgcgagcctcccagcacgccgaaccgaacctggccgcagtggcgaacctgacgtcgactccaaccaacgcccaaacggtgtgggaatctatcgccagacccctacccaccgatgacccagtcggcgggctgcgacgcaaaggcatcctcggcccgcccacgccgtggtctcgcgcaggcatcgacccccgatggggattcatgctggccctgtggcggcaactggaggaggctggcatcgacaccatcatcgatttgggtcgcctagccacaccactgacctcaacgccacacctgatcgccgcacccatcgtcgaggacgccgacatgatcttggtgatgatcgaggcgacactacgcgacatcgccggcgcccgcacgatggtggagggactcgctgagcagatgaacttggccggcgcctaccgacgtctcggactgcttgtccaccgtggcggccaggcccgcggcgtcgccgagttcaatgacaaggagatcacctcggcgttacgactcccggtcatcggggccattacccacgacccggccggagccgcccaactctccgacggggtcgggcagcggttcgacaagtcacgtctggcccactcactatcaaaggtggcggccagcctcgtcgatgccataaacaagcgccacgctgatgacgaggaggatctgtgatggccagttttgctgataatccgttcgacaagctgcgctcccaggatgcggcaagagcttcggtagagcaggagcctgatgccggattagcgtcggagttgttttcgacgtcgtcggggtgggccagctctcagcaggtgtcccaagctcaaccggtgatgacccgttcggagaacgtggattggccggttgtcgcggagctagccagtacggccactgatgaggttgaggctgagatcagcaggtggagttccactcatgatggggtggcgacgctagacattcgccaggccatcgcggagcctgctattgcctcggcggtgtctacgtatgctgaccgacgccagatcgatgtaggggagacctggcctgatctggtacgccagcgataccgcaaggctgtgtgggatcagctgttcgggatggggcggttgcagccgctgttcgaaatcagcgacgccgaaaacatcatcgtggtgggtaaccatgaggtggttgtcgaccacaacgatggttcccggtcaacgctgccgccggtggccgactcggatgccgagctggaatcccagatcgcccggatggcgaggaatgcgaccccgcggcgagccttcgacgccgatcacaccgatgtgacgatcatgcaccaacagaagttccgtatccacgcgatctcttcggaggtgtcgttgcaaccgtcggtggtcatccgccaacatttgctcacccaaatcagtctgggggacctgtcccagcggggaatgatgccggtggaagtggcccggttcctcgatgaggcggtacaagctggcaagtccatcgtggtcgccggcgagcagggggcaggcaagacgacgtttttacgagcgttgatccacgccattccgatgcgggagcggttcgccacgttggagaccgatcaggagttgttcgctcatctgatgcctggccgggaaaacacgctggtgctgttcgcccgtgatggtaacggcgaggtggatccggcgactggcacccagcacggcgctatcgagatcgcccagctgattcctcctagcctgcgccaggcgttaactagggtcattgtcggtgaggtgcgcggcaatgaggcttcggccatgttccaggctatgcagtcggggactggcactatgagcagtatccactccccgcgagcctctgaggtgccgtcccggctagcccaaatgatttcgatgggcccggtctacgatctggatcaggccatgctgcagatcggtcattcgatcgactacatcgtctttgttcgtaagcgtgacctgcctgatgggagccggctgcgatttgttgagcagatccgttcagtctcgcctggtgattcgacaactcccagtcttggcgaggtgtacacggctgactcgtggacaggccagccgcttacgccactcatgcctggttcggccgccgacgagctgtctcacttcgcccgagacctggattactgcgaggcccactcatgaacactcccgcactaaccagcgccctcatcgtgaccgggttggggctgatcctggccatcgacgggctggtcccggcgccgcctcgacctggtgccccgctgagcccggcccagaggtgggctcggctcacccaccgtcccacaggagcggccgggcgtcgccgggatttgcgttgggggttggctgttctcgtcggcgtcgtgctgtttgtgctcaccgggtgggtggctgcgctggcgttgggccccatcattgtgttgttggcccccaccctgctgggggcggccccaccgaccgatattccgctgatggaggcgttggatcggtgggtgcgtcaggtcgctgcggtgctgccacaggggcgagacatcatcacagcggtgcggatctcacggccgcgggccccgaagctgatcgccgggtcggtggatcaactggtgtcccggttggatggccgtatggagccgagggaggcgttccagcggatggccgacgagctggactcggctgaggctgacgcggtgctggcctcactagcgttggcggccactcatccgcggggagcctcgacaacgttgaaggctattgctggcaacatccaacagcggttgaaagtgctgcggcaggtggaggctgagcggtctaagccgcgtaactcggtgcgccagatcacactggtcacgatcgccatgttcggggggctgctcgtgatcggacggtcgtttctggccccgctggcgacccctcccggtcaggtgctggtggccgtggcggtggtcatgtatgtcatcgcactagtgcagatgtatcggatggcgcggccccgtcgacgcacccggatcatggtcaggaggacccgatgaccattactgctttgtccctgctggccggggccatcgtcactgtcggactgctggtcatcgtggcagcgttccgcccagccccaggccctgacctggttgccgctctggaggtggtgtcgggtcgcacctcaagcgtcgccgagaacgtcgaccagacccggatcgggcggataggtcgcagcgtgacccgcacattccatgtgtcggtgtccccggccatgcgggccgcactgcgactccaaggcacgacccccgaagcgttctacggtcgacgcctgatctgcgcactgatcggggcgatcctgccgtggctgctcaacgcggtagccatcgcggtaggggcgaattccccgaacctactcatcccttcggcgctgtgtgtggcgttagctggcgctggatggatgctgccggcagcacggttgaaggctgcggccgggcccaccaacgatgactcgttcgaagcgctgctggtattcatcgatttggtcgtgctggaacggctcgccaacgaaacctccgtcgacgcgctcaccaatgcggcaaacatgtcggactcgccgctattcgtccagatccgtcaagtcctcaaccgtgcctccctggaaaacgtcgacccgtggaacgggctagaccggctagccgaggacatcaaactgcccgaactcaccgatgtggtctccatcgcccgcctccaaaacgaaggcgcctccctcgtcgacagtttccgggcccgagtcgccgagttgcgcgacgcctacctgctgcgcctgcaacaagaatccaccgccatcacccagcggcttggtttgtggacgatcctgcaagccggctcggtcatgctcatcttgctgggggcggccgccctcacactcatcacagccggataaaccgacatcgtgtcgagcccccatatgggccgcgaacctttcataatgatgcctgtaagcaccacaatattgatcacaacctaacaatgaaggagaaatcatgatgaccgatctcgacctggctaaaaaacagatcacctggctggcggcgcacctgcgttcccggatcgttgacgagcgtggcggtggtagctctaccgtggagacactgatttggattggtgtcatcgtggcgctggtgattggtgtgggcgtcggggtgacggcctatatcaggtcgaagatgcctcactgacgacgatgcgtagcaggttcacaactgatcagcgtggcggtggtagcgcgtcggtggggatgctcctgctgatgcctgcgatcatgctgctggcattcggtgggatcgaggtcgggatgtggtgtcacgcccatcagtcgaccatcgcggcagcccaaagcgccgcggaggctcagcgtgtcgtccatccggtcccggggtcggcacaggaggcagcctcgcagatcactagtcatggcggggtgcgtgatacccggatatcggtcagtgatgacggggccactgtcacggtgaccgtctcaggtcgggccccatcgatgctggggctgcatcttccggctgtgtcgtcgacagcgtcgatgcccaaggagcgcctgtcgtgaggcgaagtgagcgcggtggagcaagtctaagcgtcgaggtgctcatgtgggcgccgatcgcgctggtgatcatcgggtttgttgtgggtatcggccggatgtcgatggcccaggacgcggtgaatggcgcggcgggtgctgcggcccgtgcggcgtcgttggagcgtgatggacagtcggctcagtctgcggcgcagcaggcggcgtcggcgaacctgtcgtccggtgggctggcatgtgcgccgagtgtgagcgtggacacgtcagtgtttgcccgtcctgccgggcaggcgggcacggttcacgccacggtcacgtgtgtcacctcgctgggtcttgggttcgggtcccggacggtgcacgcaacggggtctgccccggtagacacctatcgggaaaggagaggctgagatggcccgtgatgagcgtggtggcggctcggtgtcggtgtggatgctgctcatggtgccggtgattctggtcatggccggcctggtttttgacgggtcccgtcagatatcggcaacccaggcggcccaggacgcggcggttgcggcatcccgcgccggaactgatgcggcagcgacaccgcagcttgctggccacgacggggcggccgtagcagtccaagcggcccgccaggcactatctgctgccggggtggacgggtcggtgcaggaggacgggtcgaccatcacggtgaccacgtctcaaagtcggccgacagtgttcctgtcagcgatcggaatcagccaggtaagggggcatgggcaggcccatgctcagcttgtgggaccgggagaacgcccatgacagtgatacgtcgtatcggtgccctggtggcactgctggtggtgatagccggcttaccggccgggctcgtggccgcaggcgccccgctagtaccctcgggcctgtcatgggcccatgtgcggcatctgttggttaccccagacatgaccgggtcggtgctggtgtggctggtcagcctcatcggctggatcgggtgggcatggttcgccctggccgtcgcagccgaagcggtgacgatgctctcagggcagcggctgcactggcacatgcccggccctcgcctagtgcgccgagtggcagccggtcttctcattgccgcgttcgcggccgcaccggcagccacaagcacggctcacgccgccgaggccacccatgtggcggtcgccgcccaggctggaccggcacacgcggcccccgcccaggacagccccgccaccacctctcaggccccggacgcctccaccactccgaaaatctggaagacctacacggtgcgggccaacgactacctgtggaagatcgccgagcactactacggtgacggcgcc

SEQ ID NO: 204 - DNA, 12539 bp, Propionibacterium acnes
  source 1..12539: mol_type = genomic DNA
ccccaatgcccccacaacgatcagcacaccaacagcgatcatcaggtgggcagcactaactgatcccaacggaccaagatcaaacaagccctgcccgggagcgccgagcagtccgtgggcgcgaagccatgctccgagattgccaatgatcttggggatcatcttgttcagtagggctatccctccgatgccgacaacgaggaagacgaggatttcttcgcctgcgttgtttcttcctgtgtttgcggtcatgctgccttctcggggtggatggccagccagctgatgaggttgtcggtgatctgccctgagatttggatcagttcgacttgcccggcctgccatgcccgcgatgtgccggccagcaatgatgctgggacccctactgcgcggccacgggatgcaacctcagccaaggcggcgcgtaactcctcgacggtgctttcgatgtaccaactgccgtcagtactagtctcagcggcatcggtggtagcgataagagcatcggtgaggtcgtcgacggcgcggtccagatcagcgatgtccggtagggctacaggagtcatggtgtgtcttccttctagggtgccttcactggtgaaggttccctagacccggccgatgtgcggttctgtgggaaaaatgcttcccattggtccgtcttagttaggaaacttggcctaagtgctgtcgagggtcgcgtgttcgtgaccggttcgaagacactgccgccttgccttcttgcccgtggcgtttccgagatggggtcagtgggcgatggctaggccgatgagggcgccgctgcacaggctgggtgcccaggggaggaatcgggtggtgtggtgtcggcagcggtcgatgagggcatatagggcgatcagagtcagcccggctatgacagtgacctggatcgtgtcgatgccggttgctgcggccggggctgcccacagtggtgtgatgcgcacgtcggagaagccgaagccgcctcgggagatgagccaggcgatcatccacgctgcgaagatgatggcggtagcgatgacagcacgtatcgccgcagtatggtccgagagggcggtaacgactacagccccgatccatccggcccatccggtccacgctaggactgccggtatccatgtggtgatggcgtcaatgacggcaacccatgccccgatggtggctagcagggcccacgtcggccacgtgggtgctggggcccacattgtggcggcgatcatggtgaccgcagccgcggcacagaccgcgatcaagcttcggagactgtaggtgtcgcggtagacgatcttgtcggggctggcggtagctggttcgggcaggacgcgggtgagggcaggccatcctgcgaccgcaatagccgcgacggcgaccacccacacgatctgttgcatgggtctcatcatggcccatcatcgatgagtatgggtggccgacatggggtcactcgtagaggggatcgaggggtgtgcgggcgagcatggcttcctgtgtgccgagcatgagggtgccagaatcctcgccagccgattcccagtcgacgatgacctggtcgccgtcaacgctggattcggcgatggtcacccattgcccgtccatgtcgatgagcatcccggcggccagctctgtggcggcaaccgggtgggctgggctgtagaggaggtcgatgtcgcgggcagggtcgtcgggttcttcggttacctcgggtggggtcgatctggctgtctcggtgtcgtcggccaggtcggctcccaggatgcgttcccattcggggctggttttcttgcccgctgaggccatcgtctcgtcgatctgttcgtcagtgggccacacaaatttctttttggtccaggtcgtggtgtcgggtcgcagctgatccagcagttccaggtcttgcggggagtgggccttgcgggggtcgggggtgtagaagaattggacttccttgggggctgattcgccggataggtaggtgccgcggccgcgtttgccgaacgggattcccacgccgacgtgttcggagccgaacatcatgcgggctccgtcagcggacaggggtccggtggcggcacgcccggagaagttgtctcggatttcgccgcccaggaactcggcgtcggggcgttgggtccccagatcgacgtggatacggcaggcggctgccatgcgcagcagggagccgatccagccgaaaacggggcattctccgggcatcccagagaccttgatcgttgaccaccagtttttcgcgttgccgtagaactggcggtactcgtcgatgaggaccagcacgcgggtgaagtcggtctcgcgggccccttcttcttcgatgcggcggtagcggtcctccatgagagaccacagccagtggatgagggcgacctggtcggggacggtagtggcgaccatctcgatgttgggccactcccgcaggcccaggtactcgatgcgtttagggtcgatgacgaagacgcgccagttgcggcgggcaccctcgacggcgtcgccgatcatggacaccgtttttccggtacgggtgcggccggccttgagctggtgggccatgacaccggagatgtcccagaaacaggtgttgccgtcctcgtcgacggcctgggggattttctcccagtctggggagtctgggcccggaagggccacgggtcggggcaccatcgagggcagggggtggcggcgggtgacggtgatggtgtcgtgttccaggtcgaagtcgctgcgccactggccgagcatcatcgccgaggtcaccgcggccaggcgcaattggatgttcgggctggacaaatgggcgccacgttggtggtgaatggtgaagccgtccaggttcccccgatcggttttccaggaatcgacggtgaccgccgacccatagatctgagtggctacttctttagcccgttccttgtctcggtccagatcggttttgtcagggtcaggggtcggggcgcggtattgcaggacgaaccggcccgccgggatcgttgcggatgtcaccgtgaactctgccggcgaccaggcagccgcggccgcctgggtgagggccattggcatggtctcgacggcagcctcctcgggggggatggtgagggtcaggcgtcgcggatgcgtcttcttgcgattccatgtgactttctgcctcaccggcaccttcgccgccgactgaatggctaggcgagctgattcggcagtttcggtacgccggccagcgcgtagcgcccgtcgtgcgtgaaggctgcccaccacagcacagcccatacacggcagccaccagcgcggatcagcggctgctgcatagcccccggtagctagtaccgcacctgaccagccggccgcgatacttttccacgccggtttcgcaccaacagtcggggcagacgctggccgcttcgagaccgaggagggacgagacaagggagtgctggtcatgccgcggcctccttgtggcaggtcatttcacaggcatgccggccagcgatgatgccgtggcgcaccgccccggtagccgcatagaccgcgcacaactcaaacacggggcacccatcgcaggccgccgggttcatgctttctttgtcccacgatggtgggtcatcggtgcacggcacggccaggccatcctgttgagcggcgctgatagcggtgaataggcgcagctgggcgcgaacttggtctggggtcaggttgacggtgcgggctacacgcatggggttccttcctcttcaccagtgaaggttccctagacccggccgatgtgcggagggatttcagtgttttatcgaggtgaccagccagccggtctgcgctgcgggttcaggtaccagggtcagatgcaccacggtgtggtcggctaggggcacggcgaccaggggcccgtcggcgctcgccccggtgagggtgggagttccggccacggtggtggcgggaatctggttgggtttcgcggccatcagggagcccatgagggtcggggcggcgatctggacgagggcgactttgcgggcggcgggatcgcgggtcaaccagccgcgggtgaaggtgagcgcagccgacgtgatatcggggctcagcggggctggtgtggcggcggggtgggccgttgaggagggccatacgcgcggtagcgctggcgacatcgagcgggtcggagtggggtcaggtgtggggcttagggtccgatgtggcgatggggctaccgccccggtggtgggagacgagactggttgggggtggtgttgagggcgtgggatcagggtgaaggcagccaaactggccgggatgaggatgacggccgcgccgacacttcggagcgaggtcatgtgacgatccttcggtagctcgacgggttgccgtagatcttttccacgttgatgccactatgtgggttgtcggcgctaaccatttggcctccaccgatgtagacggccacgtggtgggcagggcttccccagaggatgaggtcgccgactttgagctggtcacgggccacagcagtgccgactttctgctggtcggcggcggtgcggggaaggctaatgccgatacgccggtacagcgccgaggtcaggcctgagcagtcgtagccgccatcggctttgccgttaccaccccacacgtaggcgtaggagttgttgtcggcgatcgatttggcccatgccacggcttcggccaggttcttcgacacaccggtctcgttagcggccccggtggcacagttgtttgacaggtgccctgtagtagtggatcccactatttgtttggccatggtttcccatttggcgtaggcatcgggcagggctgagccttgcactgcctgagctgcctgcgtcagcggcatcttctgccagtcagcgatgtcgactaaaccgggaatgtggaatccagggccgccggccgatccggggccagcgtaggtgatggtgtggcctttcaagaacgcctcggtggcgtaggcatcattgttgacctgatccagagtcccgtaccagcccggcaggatgcgctgctgaaaggggccggcgtcaccgtcaccgttagccttcgctgaggtagggtcggccccaagatctgattcttgtttggcggtcatgatagcgatgaccgctgcctgggtaggcagtttgtcacgctggaccacagtgacgatggtggtcacgagctgcttctgcctggccgtgaggcctccggcacccacagtgcctccggtgacggtacccacgcaagcatccccgccgacactgccaccgccgccgccagagttgtcgtcgagggccccagagcctactgacagcagcggcacaatgatcacggtcgctggcaagaccgccaggcccgccagcatcagcactgctgcactcaccacggcgatcacgtgagatgctttcaacgctgcccacctctcgctggtttgagggggcgacgcctgctggtacgcacaggcttggttgatccagtccgccgttgattggcaggcctgggtttgatcggcttgctgggacccggtttgggctccggagtcttaggctccggcttcacatgcctaggcacttcggctgcggtgggaggagtcagcacgtggcgtaccggcttggtgaccttctgggcacccgaaacaaccggcttagacaccaccttggcacctttgaccaccggtgcggctgccttcgcgccggccttcttgactgcacgatgcgctttgatagccccggcctcggcccggccaaccctactagcagtagcatcgagggctctgtggcccgtcgttgccctcaccggtgcatccttgccctggcgggtctgcttcgcgatcgccgacatgccgcctcgcaatgccgaaacatgattgtgggcgtgggcgatcgccgacatgccggccgtcgcgatttttgactggccctgcggggcccctgccccagcacgaatctgccggtaagccgccgacgtgccacgagcacccgccgccattcgcgccaccttcgcagccctagtcactcccgtcgacacgccacccgtggctaccgcagcagcacccgagaccacagtcgaggccatccgccttcgacccgatccggtgagcttgcgaccaccactgcgcaccatccggcgagcaccccgcccagcccactggccgatcaccgagcccctttcggaacgcttgctgcgcatccaatcgttgatcttgtccctcagccccttctcgcccttgtgacgacgccacatggacatcaagaacccgataatccccacgagctcgagcatgttgacaaccatgaccttgatggcgacatcaccgtcagaggcgaaaaccgacttgatgatgagcatgaccacacccaacatcaccatcgacccgacaatgccgatcatcgagtacaagatcgaacacagatcccggatgagcggatctgtgcggccagggatagcccgcaacacgttgagcatcgacataaacgccgaccacaccaacttgcacacgtagaaccagcacatgcccgcgaacaccagcaggaccacagccaaacccgccaccgtcgacgagtaaaagaagaaacccaccaaccacgaaccatccgcaatatcgccggcgtaatccgacaacccctcatcacagtcaccaaggtcgtcgcgagcatccgagacgtcatcgtaagggccacccttgagcacctcgatgtacttgtcgtggcacttcgcatcaataatccggccatagttgagctgctgatgaaccggcgccacgaacgagtccacaatgatcgccgacagcttcggatccttcgagtctcccgtcgaggtcatgtcatcaggaatctcgacctcaccagcggtcgccgtcgcaggatcaaccgaactagtaatcatccgagacagcgccacaccgaactgctgggtgcgagccaacggagtagccaacgtcgtcgtatcgcctgcgaacttcgccaccggggccgccaagaaacccaacgccagcgccgcagcaatcgccgcacgcgcacccgtagcccacgccccagccgtacgtcccctcatcatcttgacgaccacgcccacaccggcgcacgtcgtcagcaacgtcaacaccgttccaccccagctgtccgctcccagcggggccaaaaccttgtcgtggatatcgttctgcaaccccaccagcgggccggtaatccacccgacccagctcatcgccacggtccagtccaacaaccggcacagcaacgcaatgaccatcaggtacgtgttccaacacataccaataatggaggcccacatagccttcaacggggccgtaacgccaccatcgtccatcgacatctggtactgaaacaagtgaataccgttggagtcagtcacattgaaaccgtcacccatccagcccagccccgggcccgacgccatagcaggcacactgctcagcgccaccaccaaaaccagcgtggtgacgatgatacggaaccaccgctccccggccccggggcggcgtggatgacggctcacgctgtctcccggtcgtgctcgggcgggttggagctggcggcttcgcggtggggagcgtaggcaggtctcagtagtcgaatttcaccgacgttgccgtgctgatcggcgtacaggccacaaccggggcctccggggttgagggcaatcttgaccaggtcagcgaactcttcaggggacgttttagggtccacgcccaggaactcgacacctttctgggcgaggttgatgttgtcgcacagcaacacgatgcgatgctgaatgaggttgcggacggtctcgttggggtaatcggcctcggggtcgtgggagccagtaatgagccaggcgttggctcggcgggattcgcgcacgtactcatcgatggcgtgggaggcttccggcgaggacgacatatggtggaactcgtcaacgatgaaagcggcgtcgcgggcccggtcgctgaagcacaccaggcgagccagacgggcaataagcgcgtagagggctcggccaaacaccttgtgcgggggcagctgccgaaacaaatgttctgacagcatctcctcggcgttaggaagagcgatgccacaagtgccaatgatgaggatgtcggcactcaggtcggcgggaggaaggtccgggtcaaagatggccgaagctagggaggccgagttctcgatgtcagcgaacacggcaatcctgtcagcgatcgcggtggcctcgggaaggtcgcactcctcggccaggtggcgggccaaacgcccacacgaggtgatctggtggtcacgcatgtaggccggtttgaggaccttggccagcgtggtcccggccacaccgatggtctccaagttaagcaaggtcagcaagaacgactgggcgacctgcccggccatctccgggggaaggatgcgcagcgggtccagcgacagcttggggtgggccgtgtcgacgatctggcgtctaaccccgtcgatagagttgacaaaggttacccactcccgctcatcggagttgtcggtggcaataatgcgcccgccccgggccgcgatggctgcgcacagccgcttctcggccatcgtcttgcccgcgcccatcttgccgatgaacgccaccgtgttgcctttctgatcctgagtgtcggcatgcaaatcgaggtaggccagcgactgcaacggggagcctgtgaccacagccaacgggatgccggtggtacggcccaaccggtactcaaccaccgggatagatgcggcgaacgcggaggcgtgagtcagctgacggtaggcgttaagcgaggaggagaaccggccaccgggccgggcagcccacagcaagtcctcctgacggcccacgggacgcacccacgtgaagtcaccgaacaccggatcattgacgaacgctcctgccagctcctcggtggtctcaaagtcaggagacgagacagtgacggtgataagagcctggatctcgacctcacgctcatcggcggccagctcggcgttgtagtcgacgagcacctgagcggaatgctcgatagacatgagggtcgaagcctgggtcatctcaccgccctcaacattgtcgagctgatcgacggtttggcggatggcccgctgatttttctgcatcgcagcgtgacgggtccgggccactccccggatcgccacgtcgaccggcacgccagtgtcgtcgatacggcccaagaactcgtaggcaggccacgtcatcgtgcggggcaccttacccagcacgatatgggactggtagacggtctcgccggtgtcggcaccgattttgaggacgcgacgattccacgcctgagccgtccgggacatgtgggagactcgcttgtcatcctcgctggccagcaggtcggaggtcgcggcctcatcgatgaccaactcccccagcgcggcacgtccaacctcatccatgagggcgattccctcgccaggggcatcatcacgcaaccgggtcgggtggcctgacaggtgctgccgaagccagatctgttcatcaacggtgaccgggcggggttggaacgctgccggcagtttcgcaccgaattccttagcctgacggagggcccactcccgtgcgacacggccaggagcggtggtcatgagtccggcgacttcggtgattttgttgagggcggcggtccaggcggtgtgggtgcgtattttctggtcttggttgagtttgatcgataggaaccacacgcgccggcctagggatgcggtttcaggctggtcgagggtggcgtcgatttcgtcggcccacacggggtgttcgctcaggtcgaggccggcggccatggcgtcgacgatttctgtggggtcggtccaggtgagggccccgttgaggcagaactcgtggcgggcgaggtggcggaataggtcgcggtgagctgcggcgacggtgagggaggcgttctcggtgacgggtcgctggaggggagtaagtcgccaagtggcccagatgtcgccggtggaggtccagacgaggttgtcgaagaggaaccgttcggggatggacatcatgactccttttcggcggcggcgaggaaggcttccaggccgctgcggcgtacagcgttcccagtagggtgcaggggttttctgggggtgggttcagatttcgaatgtgggaagagtttgtggatggtatcggtgtcctcggcgagggcttggtcgagcaggcaggtggccggggtgtcggtcatctcgtccagctcgtcgatcatctcgtcgaggaggttgggggtggtggatgcggcccacacaggtgggatagccggtgcgggtcgaggcggtgtggggaggcggagtttggtttggccccagaggggtgtgtgggtcatgccggcgggagtggtggcggcgtgagtggtcacacgccaccagcccgacagccatgccagaggtgaccaggtccagtcgatgcgaccaacaacgaactgggcgagccatccggcagccagcgcgaaaatgaaaccgcggatggtcatgcccccgtcgataattttgaagcccatcatcgcggcaggaactacaccgccgacagcgagcacctgatagatcgtgtagggcccgccaggaatccttcgacctgaggaatccttgccgataatgcggggctgctggcgggcctcggtgtgccactgaatatccacgatcagctcttgcccaatccttgcatcatctgtccgaagaattggatcgcgttaccttcgataagccagtgcgccataccacacacaaacagcatggagacgatcttggccaggctcataccgtgtttgaagatgttgaacgcggcaatgcccacgactacgaccatggcgacggctcgcaccgcggactgaccttcacctgccttgatcgtcgtccattcgaagaggttctgcgattccagtggcagcaggaggaattgatcgagcatgagaggttttcctttcaggaagccgaccgggatggtcccggtactgacgggctggacggcacgggtgtgccggccaggggcagaaggcgtgacggctggtcgagggcggcaacctcccagcgtcctgcacgactgacaagagtcaggccgtactggctagtccgggtagtggattcgtcaccggtgggctggcatgtcacggtcaccgtgacggtaatcttctgccgatctgagggggtggggacctcgtcaggccccaccacatgagtggttttcaccgatacacacggggctgggtcaaccgcggtgaaagcggtccccgggctactccatctcgacaggtcagtattcccggtcagcatggcggccaagaaacccgaagaggtctgggcagccgggtcagcaggacgaatctccgaggagtccacgtcgggggctgaggccggtgcaggcatggggatctgcccaggtagacgcaaggcgatggccttgccgccggcatcgacgtggaccggaaccgaccaggcctgtccgctcccggattggccgcccatggtgaccacggtgacctgccacaggctcggatcagacggggagacggtagcgtcataggcggtgacggtggtgggcgctggaccaggtttgcggggcatgcgcgcatcggtgatcttggccgccaccaggtgttccagattgtccaagtgcccggagtcagaggtcagcagaagagtagtcacctcgaccgcggtggctgaggcgatctgagctgtgcggcggtcgtgatgggtggtgtcagtgctgacagctgtggtgggagcggatgccggggccgccgaacggaccagggcaacggggccgcatgcgactccgcacagcacgagggcaaggaagcctttggtggccatcgatccggtgtggggccagggacccacgttttcctgtgcctgttttttcttggccgaccaacggcgggacttagggttagcggatgcaccttctggggtgcatgctcgtctcaatcgcatcggtcacctccttcactggatgaagggaccaaggaggtgaccgatgtgcggtcgaacccgaaaaagttcaaacttttttctgggtctgcctcaagtacgacagaaggcctgcatcatcacggcgttgtggtagcagatcttgcgtcagcgcaaatgcatgggcctcgtaggagtagctcttaggtaggtcccggtggttgcggccagggcgagggtgtcgggtatgtgtagcgctagtcccgggttcgtggtgtgagggcttttgggtgctgacatgcactacccattgctagacgctgtgctgtggcatggctggacgtctagcagacgggttgacatcacctttaggctggcagcgcccgaggccgcaggccagaggaagcggacagcctaacgattgacgtccccctctcctttccccaacctcctggagtcgatgacccggagatagatcgatgtctatgcatcggtgcatcgatatacctatgtatctgtctgtggtttttagaggccactcccgtcgccccgggccgctcagcgataccgcaaggctgtgtgggatcagct

SEQ ID NO: 205 - DNA, 2061 bp, Propionibacterium acnes
  source 1..2061: mol_type = genomic DNA
gcgagccacgaccatcgccaagctgaatggagagcgagcatgagcaccacccctgccgggttcgacttcgacgctctggccgagtgggccgagagcgatgaggcgacccacaccccgcaaaccagccctgtgttccggggcaaggacgccgcgcgcgccagccgcgcattcctcggccgaggacggcccaccctcggcgcggaccacgccaccggtgagggccggtcgccccgccgtcaggtacggctcgacgcacgcaccaacgcgcgactcgacgcctacgcagccgcaaccggcaccagcgcctcccagatcatccgcgacgccctcgctgactacctgcccgcctgatcccaccccaatccactcgggcgcctgtcagtgcccccctcttctgggtggtggtccggggcgtcaccgccccggaccagttgggtagtcatctcagttgaaataagcgattagtgatacgcccctcctgctttccggtgctgtcatgagcgtctgacaacagcgacacctcggggcagccgacggacagtcctctggctgccgctctgatcccatgcccacggcacgaaggtgtcggacagctcggtctcatcatgtgcccaaatagcgtcgtgggcctgtcgccaagcttctcgggagccccacacgggcacgaccgggccacaccggtgtcctggtctccagtgtcgcgacactgtcgatttcggtacgtgcaatgcggcggcggtttgacggatcgacatcccagactcccgcgcgtcccagatcgccatgtggagagtatttgcctccagtgcggccgccacacttgcacgctctcgcgcacgctcgaatgcccgcctagtgctctcaaatgtcgtcacgacgcctccccctgaaaatactcagggtgtcccacggtgggacaccctgagtatttcataccccaactcgcctcaccacacgtcgacctcgacaccgatcaagcgacccgtatcagcgacattgccgtaccgctgacccgcctggtcctctagccacgacaacgcatcccgaaacagcccgacgtcttccaaagctaaaccacagtcgtagccgcccttatcccccaaccgcaccatctggagctcccggtggcctccctcgtcgacctcgatccacagtttcgcgtgcatccgctggcctcggccctctgacaggatctcggtgagcagatcggacgcctgccctcgcgcatcctcgttactgcgggggaattggagtatgtgggaggaacgatgatgggggaggttggtgacctcatggcgcagcaggttgcgcttgtgcatctgctggtcgagacggtcgggctgacctgttgacggggttgtgccgtggcggcgtttcctcggcggggtctcgatccgttgctcttccggcggttcggcgtcaggttgtggtgcgcgatctcccctaggacgggggggctcgccacctatatccgagggacgatgagacggccttccacgcttgctgcgcactttcgcagcccgccccttgcggtcacgtcgacgcggcggcggagtgacgtcctcaccgcgcgctaactgtgttaacgcctcgaccaggttggtgcccggtttcagcccttttagcacgaaccgcaccaggcgggggtctcggccgattcgtcgggcaatctcggcttggctccacccttcggctaacagggtgcgcaacaagtcttgggcccggttatcacgctcagtcactggtcgcctcctcggggagtcctgcctgctcggcctgctctgatagagcagcccgttccgatccggtctgaggcgctttcaggggaccgggtaggacacctttgacacgcagtcgcccgtccttgccgtcatcgccgcccccctgggccacagggagcgcccaggggggcacgttgctggtgtagatggcgtcgccgtggatagccagcagggtgcgggagttcatgcgtagtgctcctcccttggttgtggcgttttttccggtggtggggtcggcgatgggtgtgttgagggtgcgtacgcgggacagggcccagat

SEQ ID NO: 206 - DNA, 12531 bp, Propionibacterium acnes
  source 1..12531: mol_type = genomic DNA
ccccaatgcccccacaacgatcagcacacccacggcgatcatcaggtgggcagcactaactgatcccaacggaccaagatcaaacaagccctgcccgggagcgccgagcagtccgtgggcgcgaagccatgctccgagattgccaatgatcttggggatcatcttgttcagtagggctatccctccgatgccgacaacgaggaagacgaggatttcttcgcctgcgttgtttcttcctgtgtttgcggtcatgctgccttctcggggtggatggccagccagctgatgaggttgtcggtgatctgccctgagatttggatcagttcgacttgcccggcctgccatgcccgcgatgtgccggccagcaatgatgctgggacccctactgcgcggccacgggatgcaacctcagccaaggcggcgcgtaactcctcgacggtgctttcgatgtaccaactgccgtcagtactagtctcagcggcatcggtggtagcgataagagcatcggtgaggtcgtcgacggcgcggtccagatcagcgatgtccggtagggctacaggagtcatggtgtgtcttccttctagggtgccttcactggtgaagggtccctagccccggccgatgtgcggttctgtgggaaaaatgcttcccattggtccgtcttagttaggaaacttggcctaagtgctgtcgagggtcgcgtgttcgtgaccggttcgaagacactgccgccttgccttcttgtcagtggcgtttccgagatggggtcagtgggcgatggctaggccgatgagggcgccgctgcacaggctgggtgcccaggggaggaatcgggtggtgtggtgtcggaaccggtcgatgagggcatatagggcgatcagggtgaggccggctatgacagtgacctggatcgtgtcgatgccggttgctgcggccggggctgcccacagtggtgtgatgcgcacgtcggagaagccgaagccgcctcgggagatgagccaggcgatcatccacgctgcgaagatgatggcggtagcgatgacagcacgtgttgccgcagtatggtccgagagggcggtaacgactacagccccgatccatccggcccatccggtccacgctaggactgccggtatccatgtggtgatggcgtcaatgacggcaacccatgccccgatggtggctagcagggcccacgtcggccacgtgggtgctggggcccatgctgtggcggtgatcatggtgagtgctgctgcgctacagaccgcgatcaagcttcggaggctgtaggtgtcgcggtaggcgatcttgtcggggctggcggtgggtggttcgggcaggatgtgggtgagggcaggccaccctgcgaccgcaatagccgcgacggcgaccacccacacaatctgttgcatgggtctcatcatggcccatcaacgatgagtatgggtggccgacatgggctcagtcgtcaagaggtgtacgggcggttgtggcttcttgggtgctgagcatgagggtgccagaatcctcgccagccgattcccagtcgacgatgacctggtcgccgtcaacgctggattcggcgatggtcacccattgcccgtccatgtcgatgagcatcccggcggccagctctgtggcggcaaccgggtgggctgggctgtagaagcggtcgatgtcgcgggcagggtcgtcgggttcttcggttacctcgggtggggtcgatctggctgtctcggtgtcgtcggccaggtcggctcccaggatgcgttcccattcggggctggttttcttgcccgctgaggccatcgtctcgtcgatctgttcgtcagtgggccacacaaatttctttttggtccaggtcgtggtgtcgggtcgcagctgatccagcagttccaggtcttgcggggagtgggccttgcgggggtcgggggtgtagaagaattggacttccttgggggctgattcgccggataggtaggtgccgcggccgcgtttgccgaacgggattcccacgccgacgtgttcggagccgaacatcatgcgggctccgtcagcggacaggggtccggtggcggcacgcccggagaagttgtctcggatttcgccgcccaggaactcggcgtcggggcgttgggtccccagatcgacgtggatacggcaggcggctgccatgcgcagcagggagccgatccagccgaaaacggggcattctccaggcatcccagagaccttgatcgttgaccaccagtttttcgcgttgccgtagaactggcggtactcgtcgatgaggaccagcacgcgggtgaagtcggtctcgcgggccccttcttcttcgatgcggcggtagcggtcctccatgagagaccacagccagtggatgagggcgacctggtcggggacggtagtggcgaccatctcgatgttgggccactcccgcaggcccaggtactcgatgcgtttagggtcgatgacgaagacgcgccagttgcggcgggcaccctcgacggcgtcgccgatcatggacaccgtttttccggtacgggtgcggccggccttgagctggtgggccatgacaccggagatgtcccagaaacaggtgttgccgtcctcgtcgacggcctgggggattttctcccagtctggggagtctgggcccggaagggccacgggtcggggcaccatcgagggcagggggtggcggcgggtgacggtgatggtgtcgtgttccaggtcgaagtcgctgcgccactggccgagcatcatcgccgaggtcaccgcggccaggcgcaattggatgttcgggctggacaaatgggcgccacgttggtggtgaatggtgaagccgtccaggttcccccgatcggttttccaggaatcgacggtgaccgccgacccatagatctgagtggctacttctttagcccgttccttgtctcggtccagatcggttttgtcagggtcaggggtcggggcgcggtattgcaggacgaaccggccggccgggatcgttgcggatgtcaccgtgaactctgccggcgaccaggcagccgcggccgcctgggtgagggccattggcatggtctcgacggcagcctcctcgggggggatggtgagggtcaggcgtcgcggatgggtcttcttgcgattccatgtgactttctgcctcaccggcaccttcgccgccgactgaatggctaggcgagctgattcggcagtttcggtacgccggccagcgcgtagcgcccgtcgtgcgtgaaggctgcccaccacagcacagcccatacacggcagccaccagcgcggatcagcggctgctgcatagcccccggtagctagtaccgcacctgaccagccggccgcgatacttttccacgccggtttcgcgccaccaggaccagcgttatggacggtctgcttcgaggctgcggagggacgagacagcggagtgctggtcatgccgcggcctccttgtggcaggtcatttcacaggcatgtcggccagcgatgatgccgtggcgcaccgccccggtagccgcatagaccgcgcacaactcaaacacggggcacccatcgcaggccgccgggtccatgctttctttgtcccacgatggtgggtcatcggtgcacggcacggccaggccgtcctgctgggcggtggcgatagcggtgaataagcgcagctgggcgcgaacttggtctggggtcaggttgacagtgcgggctacacgcatggggttccttcctcttcaccagtgaaggttccttagccccgagcgatgtgcggagagatttcagtgttttatcgaggtgaccagccatccggtctgcgctgcgggttcaggtaccagggtcagatgcaccacggtgtggtcggctaggggcacggcgaccaggggcccgtcggcgctcgccccggtgagggtgggagttccggccacggtggtggcgggaatctggttgggtttcgcggccatcagggagcccatgagggtcggggcggcgatctggacgagggcgactttgcgggcggcgggatcgcgggtcaaccagccgcgggtgaaggtgagcgcagccgacgtgatatcggggctcagcggggctggtgtggcggcggggtgggccgttgaggagggccatacgcgcggtagcgctggcgacatcgagcgggtcggagtggggtcaggtgtggggcttagggtccgatgtggcgatggggctaccgccccggtggtgggagacgagactggttgggggtggtgttgagggcgtgggatcagggtgaaggcagccaaactggccgggatgaggatgacggccgcgccgacacttcggagcgaggtcatgtgacgatccttcggtagctcgacgggttgccgtagatcttttccacgttgatgccactatgtgggttgtcggcgctgaccatttggcctccaccgatgtagacggccacgtggtgggcaggggtcccccaaaagatgaggtcgccgactttgagctggtcgtgggccacggcagtgccgactttctgctggtcggcggcggttcggggaaggctgatgccgatacgccggtacagcgccgaggtcaggcctgagcagtcgtagccgccatcagctttgccgttaccaccccacacgtaggcgtaggagttgttgtcggcgatcgatttggcccatgccacggcttcggccaggttcttcgacacaccggtctcgttagcggccccgatggcacagttgtttgacaggtgccctgtagtagtggatcccactatttgtttggccatggtttcccatttggcgtaggcatcgggcagggctgagccttgcactgcctgagctgcctgcgtcagcggcatcttctgccagtcagcgatgtcgactaaaccgggaatgtggaatccagggccgccggccgatccggggccagcgtaggtgatggtgtggcctttcaagaacgcctcggtggcgtaggcatcattgttgacctgatccagagtcccgtaccagcccggcaggatgcgctgctgaaaggggccggcgtcaccgtcaccgttagccttcgctgaggtagggtcggccccaagatctgattcttgtttggcggtcatgatagcgatgaccgctgcctgggtaggcagtttgtcacgctggaccacagtgacgatggtggtcacgagctgcttctgcctggccgtgaggcctccggcacccacagtgcctccggtgacggtacccacgcaagcatccccgccgacactgccaccgccgccgccagagttgtcgtcgagggccccagagcctactgacagcagcggcacaatgatcacggtcgctggcaagaccgccaggcccgccagcatcagcactgctgcactcaccacggcgatcacgtgagatgctttcaacgctgcccacctctcgctggtttgagggggcgacgcctgctggtacgcacaggcttggttgatccagtccgccgttgattggcaggcctgggtttgatcggcttgctgggacccggtttgggctccggagtcttaggctccggcttcacatgcctaggcacttcggctgcggtgggaggagtcagcacgtggcgtaccggcttggtgaccttctgggcacccgaaacaaccggcttagacaccaccttggcacctttgaccaccggtgcggctgccttcgcgccggccttcttgactgcacgatgcgctttgatagccccggcctcggcccggccaaccctactagcagtagcatcgagggctctgtggcccgtcgttgccctcaccggtgcatccttgccctggcgggtctgcttcgcgatcgccgacatgccgcctcgcaatgccgaaacatgattgtgggcgtgggcgatcgccgacatgccggccgtcgcgatttttgactggccctgcggggcccctgccccagcacgaatctgccggtaagccgccgacgtgccacgagcacccgccgccattcgcgccaccttcgcagccctagtcactcccgtcgacacgccacccgtggctaccgcagcagcacccgagaccacagtcgaggccatccgccttcgacccgatccggtgagcttgcgaccaccactgcgcaccatccggcgagcaccccgcccagcccactggccgatcaccgagcccctttcggaacgcttgctgcgcatccaatcgttgatcttgtccctcagccccttctcgcccttgtgacgacgccacatggacatcaagaacccgataatccccacgagctcgagcatgttgacaaccatgaccttgatggcgacatcaccgtcagaggcgaaaaccgacttgatgatgagcatgaccacacccaacatcaccatcgacccgacaatgccgatcatcgagtacaagatcgaacacagatcccggatgagcggatctgtgcggccagggatagcccgcaacacgttgagcatcgacataaacgccgaccacaccaacttgcacacgtagaaccagcacatgcccgcgaacaccagcaggaccacagccaaacccgccaccgtcgacgagtaaaagaagaaacccaccaaccacgaaccatccgcaatatcgccggcgtaatccgacaacccctcatcacagtcaccaaggtcgtcgcgagcatccgagacgtcatcgtaagggccacccttgagcacctcgatgtacttgtcgtggcacttcgcatcaataatccggccatagttgagctgctgatgaaccggcgccacgaacgagtccacaatgatcgccgacagcttcggatccttcgagtctcccgtcgaggtcatgtcatcaggaatctcgacctcaccagcggtcgccgtcgcaggatcaaccgaactagtaatcatccgagacagcgccacaccgaactgctgggtgcgagccaacggagtagccaacgtcgtcgtatcgcctgcgaacttcgccaccggggccgccaagaaacccaacgccagcgccgcagcaatcgccgcacgcgcacccgtagcccacgccccagccgtacgtcccctcatcatcttgacgaccacgcccacaccggcgcacgtcgtcagcaacgtcaacaccgttccaccccagctgtccgctcccagcggggccaaaaccttgtcgtggatgtcgttctgcaaccccaccagcgggccggtaatccacccgacccagctcatcgccacggtccagtccaacaaccggcacaacagggcaacgaccatcaggtacgtgttccaacacatgccaataatggaggcccacatactcttcagcggggccgtaacgccaccatcgtccatcgacatctggtactgaaacaagtgaataccgttggagtcagtcacattgaaaccgtcacccatccagcccagcccaggacccgacgccatggcaggcacactgctcagcgccaccaccagaaccagcgtggtgacgatgatacgaaatcgccgctccccggccccggggcggcgtggatgacggctcacgctgtctcccggtcgtgctcgggcgggttggagctggcggcttcgcggtggggaccgtaggcaggtctcagtagtcgaatttcaccgacgttgccgtgttggtcggcgtacaggccacaaccggggcctccggggttgagggcaatcttgaccaggtcagcgaactcttcaggggacgttttagggtccacgcccaggaactcgacacctttctgggcgaggttgatgttgtcgcacagcaacacgatgcgatgctgaatgaggttgcggacggtctcgttggggtaatcggcctcggggtcgtgggagccggtgataagccaggcgttggctcggcgggattcgcgcacgtactcgtcaatggcgtgggaggcttccggcgaggacgacatatggtggaactcgtcaacgatgaaagcggcgtcgcgggcccggtcgctgaagcacaccaggcgagccagacgggcaataagcgcgtagagggctcggccaaacaccttgtgcgggggcagctgccgaaacaaatgttctgacagcatctcctcggcgttaggaagagcgatgccacaagtgccaatgatgaggatgtcggcactcaggtcggcgggaggaaggtccgggtcaaagatggccgaagctagggaggccgagttctcgatgtcagcgaacacggcaatcctgtcagcgatcgcggtggcctcgggaaggtcgcactcctcggccaggtggcgggccaaacgcccacacgaggtgatctggtggtcacgcatgtaggccggtttgaggaccttggccagcgtggtcccggccacaccgatggtctccaagttaagcaaggtcagcaagaacgactgggcgacctgcccggccatctccgggggaaggatgcgcagcgggtccagcgacagcttggggtgggccgtgtcgacgatctggcgtctaaccccgtcgatagagttgacaaaggttacccactcccgctcatcggagttgtcggtggcaataatgcgcccgccccgggccgcgatggctgcgcacagccgcttctcggccatcgtcttgcccgcgcccatcttgccgatgaacgccaccgtgttgcctttctgatcctgagtgtcggcatgcaaatcgaggtaggccagcgactgcaacggggagcctgtgaccacagccaacgggatgccggtggtacggcccaaccggtactcaaccaccgggatagatgcggcgaacgcggaggcgtgagtcagctgacggtaggcgttaagcgaggaggagaaccggccaccgggccgggcagcccacagcaagtcctcctgacggcccacgggacgcacccacgtgaagtcaccgaacaccggatcattgacgaacgctcctgccagctcctcggtggtctcaaagtcaggagacgagacagtgacggtgataagagcctggatctcgacctcacgctcatcggcggccagctcggcgttgtagtcgacgagcacctgagcggaatgctcgatagacatgagggtcgaagcctgggtcatctcaccgccctcaacattgtcgagctgatcgacggtttggcggatggcccgctgatttttctgcatcgcagcgtgacgggtccgggccactccccggatcgccacgtcgaccggcacgccagtgtcgtcgatacggcccaggaactcgtaggcaggccacgtcatcgtgcggggcaccttacccagcacgatatgggactggtagacggtctcgccggtgtcggcaccgattttgaggacgcgacgattccacgcctgagccgtccgggacatgtgggagactcgcttgtcatcctcgctggccagcaggtcggaggtcgcggcctcatcgatgaccaactcccccagcgcggcacgtccaacctcatccatgagggcgattccctcgccaggggcatcatcacgcaaccgggtcgggtggcctgacaggtgctgccgaagccagatctgttcatcaacggtgaccgggcggggttggaacgctgccggcagtttcgcaccgaattccttagcctgacggagggcccactcccgtgcgacacggccaggagcggtggtcatgagtccggcggcttcggtgattttgttgagggcggcggtccaggcggtgtgggtgcgtattttctggtcttggttgagtttgatcgataggaaccacacgcgccggcctagggatgcggtttcaggctggtcgagggtggcgtcgatttcgtcggcccacacggggtgttcgctcaggtcgaggccggcggccatggcgtcgacgatttctgtggggtcggtccaggtgagggccccgttgaggcagaactcgtggcgggcgaggtggcggaataggtcgcggtgagctgcggcgacggtgagggaggcgttctcggtgacgggtcgctggaggggagtaagtcgccaagtggcccagatgtcgccggtggaggtccagacgaggttgtcgaagaggaaccgttcggggatggacatcatgactccttttcggcggcggcgaggaaggcttccaggccgctgcggcgtacagcgttcccggtagggtgcaggggttttctgggggtgggttcagatttcgaatgtgggaagagtttgtggatggtatcggtgtcctcggcgagggcttggtcgagcaggcaggtggccggggtgtcggtcatctcgtccagctcgtcgatcatctcgtcgaggaggttgggggtggtggatgcggcccacacaggtgggatagccggtgcgggtcgaggcggtgtggggaggcggagtttggtttggccccagaggggtgtgtgggtcatgccggcgggagtggtggcggcgtgagtggtcacacgccaccagcccgacagccatgccagaggtgaccaggtccagtcgatgcgaccaacaacgaactgggcgagccatccggcagccagcgcgaaaatgaaaccgcggatggtcatgcccccgtcgataattttgaagcccatcatcgcggcaggaactacgccgccgacagcgagcacctgatagatcgtgtagggcccgccaggaatccttcgacctgaggaatccttgccgataatgcggggctgctggcgggcctcggtgtgccactgaatatccacgatcagctcttgcccaatccttgcatcatctgtccgaagaattggatcgcgttaccttcgataagccagtgcgccataccacacacaaacagcatggagacgatcttggccaggctcataccgtgtttgaagatgttgaacgcggcaatgcccacgactacgaccatggcgacggctcgcaccgcggactgaccttcacctgccttgatcgtcgtccattcgaagaggttctgcgattccagtggcagcaggaggaattgatcgagcatgagaggttttcctttcaggaagccgaccgggatggtcccggtactgacgggctggacggcacgggtgtgccggccaggggcagaaggcgtgacggctggtcgagggcggcaacctcccagcggcctgcacgactgacaagagtcaggccgtactggctagtccgggtagtggattcgtcaccggtgggctggcatgtcacggtcaccgtgacggtaatcttctgccgatctgagggggtggggacctcgtcaggccccaccacatgagtggttttcaccgatacacacggggctgggtcaaccgcggtgaaagcggtccccgggctactccatctcgacaggtcagtattcccggtcagcatggcggccaagaaacccgaagaggtctgggcagccgggtcagcaggacgaatctccgaggagtccacgtcgggggctgaggccggtgcaggcatggggatctgcccaggtagacgcaaggcgatggccttgccgccggcatcgacgtggaccggaaccgaccaggcctgtccgctcccggattggccgcccatggtgaccacggtgacctgccacaggctcggatcagacggggagacggtagcgtcataggcggtgacggtggtgggcgctggaccaggtttgcggggcatgcgcgcatcggtgatcttggccgccaccaggtgttccagattgtccaagtgcccggagtcagaggtcagcagaagagtagtcacctcgaccgcggtggctgaggcgatctgagctgtgcggcggtcgtgatgggtggtgtcagtgctgacagctgtggtgggagcggatgccggggccgccgaacggaccagggcaacggggccgcatgcgactccgcacagcacgagggcaaggaagcctttggtggccatcgatccggtgtggggccagggacccacgttttcctgtgcctgttttttcttggccgaccaacggcgggacttagggttagcggatgcaccttctggggtgcatgctcgtctcaatcgcatcggtcacctccttcactggatgaagggaccaaggaggtgaccgatgtgcggtcgaacccgaaaaagttcaaacttttttctgggtctgcctcaagtacgacagaaggcctgcatcatcacggcgttgtggtagcagatcttgcgtcagcgcaaatgcatgggcctcgtaggagtagctcttaggtaggtcccggtggttgcggccagggcgagggtgtcgggtatgtgtagcgctagtcccgggttcgtggtgtgagggcttttgggtgctgacatgcactacccattgctagacgctgtgctgtggcatggctggacgtctagcagacgggttgacatcacctttaggctggcagcgcccgaggccgcaggccagaggaagcggacagcctaacgattgacgtccccctctcctttccccaacctcctggagtcgatgccccggagatagatcgatgtctatgcatcggtgcatcgatatacctatgtatctgtctgtggtttttagaggccactcccgtcgccccgggccgctcagcgataccgcaaggctgtgtgggatcag

SEQ ID NO: 207 - DNA, 12036 bp, Propionibacterium acnes
  source 1..12036: mol_type = genomic DNA
ccccaatgcccccacaacgatcagcacaccaacagcgatcatcaggtgggcagcactaactgatcccaacgaaccaagatcaaacaagccctgcccgggagcgtcgagcagtccgtgggcgcgaagccatgctccgagattgccaatgatcttggggatcatcttgttcagtagggctatccctccgatgccgacaacgaggaagacgaggatttcttcgcctgcgttgtttcttcctgtgtttgcggtcatgctgccttctcggggtggatggccagccagctgatgaggttgtcggtgatctgccctgagatttggatcagttcgacttgcccggcctgccatgcccgcgatgtgccggccagcaatgatgctgggacccctactgcgcggccacgggatgcaacctcagccaaggcggcgcgtaactcctcgacggtgctttcgatgtaccaactgccgtcagtactagtctcagcggcatcggtggtagcgataagagcatcggtgaggtcgtcgacggcgcggtccagatcagcgatgtccggtagggctacagcagtcatggtgtgtcttccttctagggtgccttcactggtgaagggtccctagccccggccgatgtgcggtgctgtgggaaaaatgcttcccattggtccgtcttagttaggaaacttggcctaagtgctgtcgagggtcgcgtgttcgtgaccggttcgaagacactgccgctttgccttcttgtcagtggcgtttccgagatggggtcagtgggcgatggctaggccgatgagggcgccgctgcacaggctgggtgcccaggggaggaatcgggtggtgtggtgtcggaaccggtcgattagggcatatagggcgatcagggtgaggccggctatgaccgtggcgtggatcgtgtcgatgccggttgctgcggccggggctgcccacagtggtgtgatgcgcacgtcggagaagccgaagccgcctcgggagatgagccaggcgatcatccacgctgcgaagatgatggcggtagcgatgacagcacgtatcgccgcagtatggtccgagagggcggtaacgactacagccccgatccatccggcccatccggtccacgctaggactgccggtatccatgtggtgatggcgtcaatgacggcaacccatgccccgatggtggctagcagggcccacgtcggccacgtgggtgctggggcccatgctgtggcggcgatcatggtgaccgcagccgcggcacagaccgcgatcaagcttcggagactgtaggtgtcgcggtaggcgatcttgtcgggattggcggtggccggttcgggcaggatgcgagtgagggagggccatcctgcggtcgcaatagccgcgacggcgaccacccacacgatctgttgcatgggtctcatcatggcccatcatcgatgagtatgggtggccgacatggggtcactcgtagaggggatcgaggggtgtgcgggcgagcatggcttcctgtgtgccgagcatgagggtgccagagtcgtcgccggccgattcccagtcgacgatgatctgcccgctgtcgacgctggattcggtgatggtcacccattctccgtcgatattgatgagcaccccagcggccagctctgtggcagcaaccgggtgaggtgggttgtagaagcggtcgatgtcgcaggcagggtcgtcgggttcctcgactaccggaggtggggtagggctgagctgttcggtgtcgtcggccaggtcggctcccaggatgcgctcccattcggggctggttttcttgcccgctgaggccatcgtctcgtcgatctgttcgtcagtgggccacacaaatttctttttggtccaggtcgtggtgtcgggtcgcagctgatccagcagttccaggtcttgcggggagtgggccttgcgggggtcgggggtgtagaagaattggacttccttgggggctgattcgccggataggtaggtgcctcggccgcgtttgccgaacgggatgcccacgccgacgtgttcggagccgaacatcatgcgggctccgtcagcggacaggggtccggtggcggcacgcccggagaagttgtctcggatttcgccgcccaggaactcggcgtcggggcgttgggtccccagatcgacgtggatacggcaggcggctgccatgcgcagcagggagccgatccagccgaaaacggggcattctccgggcatcccagagaccttgatcgttgaccaccagtttttcgcgttgccgtagaactggcggtactcgtcgatgaggaccagcacgcgggtgaagtcggtctcgcgggccccttcttcttcgatgcggcggtagcggtcctccatgagagaccacagccagtggatgagggcgacctggtcggggacggtagtggcgaccatctcgatgttgggccactcccgcaggcccaggtactcgatgcgtttagggtcgatgacgaagacgcgccagttgcggcgggcaccctcgacggcgtcgccgatcatggacaccgtttttccggtacgggtgcggccggccttgagctggtgggccatgacaccggagatgtcccagaaacaggtgttgccgtcctcgtcgacggcctgggggattttctcccagtctggggagtctgggcccggaagggccacgggtcggggcaccatcgagggcagggggtggcggcgggtgacggtgatggtgtcgtgttccaggtcgaagtcgctgcgccactggccgagcatcatcgccgaggtcaccgcggccaggcgcaattggatgttcgggctggacaaatgggcgccacgttggtggtgaatggtgaagccgtccaggttcccccgatcggttttccaggaatcgacggtgaccgccgacccatagatctgagtggctacttctttagcccgttccttgtctcggtccagatcggttttgtcagggtcaggggtcggggcgcggtattgcaggacgaaccggccggccgggatcgttgcggatgtcaccgtgaactctgccggcgaccaggcagccgcggccgcctgggtgagggccattggcatggtctcgacggcagcctcctcgggggggatggtgagggtcaggcgtcgcggatgcgtcttcttgcgattccatgtgactttctgcctcaccggcaccttcgccgccgactgaatggctaggcgagctgattcggcagtttcggtacgccggccagcgcgtagcgcccgtcgtgcgtgaaggctgcccaccacagcacagcccatacacggcagccaccagcgcggatcagcggctgctgcatagcccccggtagctagtaccgcacctgaccagccggccgcgatacttttccacgccggtttcgcgccaccaggaccagcgttatggacggtctgcttcgaggctgcggagggacgagacagcggagtgctggtcatgccgcggcctccttgtggcaggtcatttcacaggcatgccggccagcgatgatgccgtggcgcaccgccccggtagccgcatagaccgcgcacaactcaaacacggggcacccatcgcaggccgccgggttcatgctttctttgtcccacgatggtgggtcatcggtgcacggcacggccaggccatcctgttgagcggcgctgatagcggtgaataggcgcagctgggcgcgaacttggtctggggtcaggttgacggtgcgggctacacgcatggggttccttcctcttcaccagtgaaggttccctagacccggccgatgtgcggagggatttcagtgttttatcgaggtgaccagccagccggtctgcgctgcgggttcaggtaccagggtcagatgcagcatggtgtggtcggctaggggcacggcgaccaggggcccgtcggcgctcgccccggtgagggtgggagttccggccacggtggtggcgggaatctggttgggtttcgcggccatcagggagcccatgagggtcggggcggcgatctggacgagggcgactttgcgggcggcgggatcgcgggtcaaccagccgcgggtgaaggtgagcgcagccgacgtgatatcggggctcagcggggctggtgtggcggcggggtgggccgttgaggagggccatacgcgcggtagcgctggcgacatcgagcgggtcggagtggagtcaggtgtggggcttagggtccgatgtggcgatggggctaccgccccggtggtgggagacgagactggttgggggtggtgttgagggcgtgggatcagggtgaaggcagccaaactggccgggatgaggatgacggccgcgccgacacttcggagcgaggtcatgtgacgatccttcggtagctcgacgggttgccgtagatcttttccacgttgatgccactatgtgggttgtcggcgctaaccatttggcctccaccgatgtagacggccacgtggtgggcagggcttccccagaggatgaggtcgccgactttgagctggtcacgggccaccgcggtgccgactttctgctggtcggcggcggtgcggggaaggctaatgccgatacgccggtacagcgccgaggtcaggcctgagcagtcgtagccgccatcggctttgccgttgccaccccacacgtaggcgtaggagttgttgtcagcgatcgatttggcccatgccacggcttcggccaggttcttcgacacaccggtctcgttagcggccccggtggcacagttgtttgacaggtgccctgtagtagtggatcccactatttgtttggccatggtttcccatttggcgtaggcatcgggcagggctgagccttgcactgcctgagctgcctgcgtcagcggcatcttctgccagtcagcgatgtcgactaaaccgggaatgtggaatccagggccgccggccgatccggggccagcgtaggtgatggtgtggcctttcaagaacgcctcggtggcgtaggcatcattgttgacctgatccagagtcccgtaccagcccggcaggatgcgctgctgaaaggggccggcgtcaccgtcaccgttagccttcgctgaggtagggtcggccccaagatctgattcttgtttggcggtcatgatagcgatgaccgctgcctgggtaggcagtttgtcacgctggaccacagtgacgatggtggtcacgagctgcttctgcctggccgtgaggcctccggcacccacagtgcctccggtgacggtacccacgcaagcatccccgccgacactgccaccgccgccgccagagttgtcgtcgagggccccagagcctactgacagcagcggcacaatgatcacggtcgctggcaagaccgccaggcccgccagcatcagcactgctgcactcaccacggcgatcacgtgagatgctttcaacgctgcccacctctcgctggtttgagggggcgacgcctgctggtacgcacaggcttggttggtccagtccgccgttggttggcaggcctgggtttgatcggcttgctgggacccggtttgggctccggagtcttaggctccggcttcacatgcctaggcacttcggctgcggtgggaggagtcagcacgtggcgtactggcttggtgaccttctgggcacccgaaacaaccggcttagacaccaccttggcacctttgaccaccggtgcggctgccttcgcgccggccttcttgactgcacgatgcgctttgatagccccggcctcggcccggccaaccctgctagcagtagcatcgagggctctgtggcccgtcgttgccctcaccggtgcatccttgccctggcgggtctgcttagcgatcgccgacatgccgcctcgcaatgccgaaacatgattgtgggcgtgggcgatcgccgacatgccggccgtcgcgatttttgactggccctgcggggcccctgccccagcacgaatctgctggtaagccgccgacgtgccacgagcacccgccgccattcgcgccaccttcgcagccctagtcactcccgtcgacacgccacccgtggctaccgcagcagcacccgagaccacagtcgaggccatccgccttcgacccaatccggtgagcttgcgaccaccgctgcgcaccatccggcgagcaccccgcccagccaactggccgatcaccgagcccctttcggaacgcttgctgcgcatccaatcgttgatcttgtccctcagccccttctcgcccttgtgacgacgccacatggatatcaagaacccgataatccccacgagctcgagcatgttgacaaccatgaccttgatggcgacatcaccgtcagaggcgaaaaccgacttgatgatgagcatgaccacacccaacatcaccatcgacccgacaatgccgatcatcgagtacaagatcgaacacagatcccggatgagcggatctgtgcggccagggatagcccgcaacacgttgagcatcgacatgaacgccgaccacaccaacttgcacacgtagaaccagcacatgcccgcgaacaccagcaggaccacagccaaacccgccaccgtcgacgagtaaaagaagaaacccaccaaccacgaaccatccgcaatatcgccggcgtaatccgacagcccctcatcacagtcaccaaggtcgtcgcgagcatccgagacgtcatcgtaagggccacccttgagcacctcgatgtacttgtcgtggcacttcgcatcaataatccggccatagttgagctgctgatgaaccggcgccacgaacgagtccacaatgatcgccgacagcttcggatccttcgagtctcccgtcgaggtcatgtcatcaggaatctcgacctcaccagcggtcgccgtcgcaggatcaaccgaactggtaatcatccgagacagcgccacaccgaactgctgggtgcgagccagcggagtagccaacgtcgtcgtatcgcctgcgaacttcgccaccggggccgccaagaaacccaacgccagcgccgcagcaatcgccgcacgcgcacccgtagcccacgcccctgccgtacgtcccctcatcatcttgacgaccacgcccacaccggcgcacgtcgtcagcaacgtcagcaccgttccaccccagctgtccgctcccagcggggccaaaaccttgtcgtggatgtcgttctgtaaccccaccagcgggccggtaatccacccgacccagctcatcgccacggtccagtccaacaaccggcacagcaacgcaatgaccatcaggtacgtgttccaacacatgccaataatggaggcccacacacccttcagcggggccgtaacgccaccatcgtccatcgacatctggtactgaaacaagtgaataccgttggagtcagtcacattgaaaccgtcacccatccagcccagccccgggcccgacgccatagcaggcacactgctcagcgccaccaccaaaaccagcgtggtgacgatgatacgaaatcgccgctccccggccccggggcggcgtggatgacggctcacgctgtctcctggtcgtgctcgggcgggttggagctggcggcttcgcggtggggagcgtaggcaggtctcagtagtcgaatttcaccgacgttgccgtgctggtcggcgtacaggccacaaccgggacctccggggttgagggcaatcttgaccaggtcagcgaactcttcaggggacgtcttgggatctacgcccaggaactcaacgcccttttgggcgaggttgatgttgtcgcacagcaacacgatgcgatgctgaatgaggttgcggacggtctcgttggggtaatcggcctcggggtcgtgggagccggtgataagccaggcattggctcggcgggattcgcgcacgtactcgtcaatggcgtgggaggcttccggcgaggacgacatgtgatgaaactcgtcaacaatgaaagcggcgtcgcgggcccggtcgctgaagcacaccaggcgagccagacgggcaataagcgcgtagagggctcggccaaacaccttgtgcgggggcagctgccgaaacaaatgttctgacagcatctcctcggcgttaggaagagcgatgccacaagtgccaatgatgaggatgtcggcactcaggtcggcgggaggaaggtccgggtcaaagatggccgaagctagggaggccgagttctcgatgtcagcgaacacggcaatcctgtcagcgatcgcggtggcctcgggaaggtcgcactcctcggccaggtggcgggccaaacgcccacacgaggtgatctggtggtcacgcatgtaggccggtttgaggaccttggccagcgtggtcccggccacaccgatggtctccaagttaagcaaggtcagcaagaacgactgggcgacctgcccggccatctccgggggaaggatgcgcagcgggtccagcgacagcttggggtgggccgtgtcgacgatctggcgtctaaccccgtcgatagagttgacaaaggttacccactcccgctcatcggagttgtcggtggcaataatgcgcccgccccgggccgcgatggctgcgcacagccgcttctcggccatcgtcttgcccgcgcccatcttgccgatgaacgccaccgtgttgcctttctgatcctgagtgtcggcatgcaaatcgaggtaggccagcgactgcaacggggagcctgtgaccacagccaacgggatgccggtggtacggcccaaccggtactcaaccaccgggatagatgcggcgaacgcggaggcgtgagtcagctgacggtaggcgttaagtgaggaggagaaccggccaccgggccgggcagcccacagcaagtcctcctgacggcccacgggacgcacccacgtgaagtcaccgaacaccggatcattgacgaacgctcctgccagctcctcggtggtctcaaagtcaggagacgagacagtgacggtgataagagcctggatctcgacctcacgctcatcggcggccagctcggcgttgtagtcgacgagcacctgagcggaatgctcgatagacatgagggtcgatgcctgggtcatctcaccgccctcgacgttgtcgagctggtcgacggtttggcggatggcccgctgatttttctgcatcgcagcgtgacgggtccgggccactccccggatcgccacgtcgaccggcacgccagtgtcgtcgatacggcccaggaactcgtaggcaggccacgtcatcgtgcggggcaccttacccagcacgatatgggactggtagacggtctcgccggtgtcggcaccgattttgaggacgcgacgattccacgcctgagccgtccgggacatgtgggagactcgcttgtcatcctcgctggccagcaggtcggaggtcgcggcctcatcgatgaccaactcccccagcgcggcacgtccaacctcatccatgagggcgattccctcgccaggggcatcatcacgcaaccgggtcgggtggcctgacaggtgctgccgaagccagatctgttcatcaacggtgaccgggcggggttggaacgctgccggcagtttcgcaccgaattccttagcctgacggagggcccactcccgtgcgacacggccaggagcggtggtcatgagtccggcggcttcggtgattttgttgagggcagcggtccaggcggtgtgggtgcgtattttctggtcttggttgagtttgatcgataggaaccacacgcgccggcctagggattcggtttcaggctggtcgagggtggcgtcgatttcgtcggcccacacggggtgttcgctcaggtcgaggccggcggccatggcgtcgacgatttctgtggggtcggtccaggtgagggctccgttgaggcagaactcgtggcgggcgaggtggcggaataggtcgcggtgagctgcggcgacggtgagggaggcgttctcggtgacgggtcgctggaggggagtgagtcgccaagtggcccagatgtcgccggtggaggtccagacgaggttgtcgaagaggaaccgttcggggatggacatcatgactccttttcggcggcggcgaggaaggcttccaggccgctgcggcgtacagcgttcccggtagggtgcaggggttttctgggggtgggttcaggtttcgggtctaggaggggtttgggctcgtaggtggtgtcgatgtcttcggcgagggcttggtcgagcaggcaggtggccggggtgtcggtagtctcgtccagctcgtcgatcatctcgtcgaggaggttgggggtggtggatgcggcccacacaggtgggatagccggtgcgggtcgaggcggtgtggggaggcggagtttggtttggccccagaggggtgtgtgggtcatgccggcgggagtggtggcggcgtgagtggtcacgcgccaccagcccgccagccatgccagaggtgaccaggtccagtcgatgcggccgatgatgaactgggcgagccatccggcagccagcgcgaaaatgaaaccgcggatggtcatgcccccgtcgataattttgaagcccatcatcgcggcaggaactacgccgccgacagcgagcacctgatagatcgtgtagggcccgccaggaatccttcgacctgaggaatccttaccgataatgcggggctgctggcgggcctcggtgtgccactgaatatccacgatcagctcttgcccaatccttgcatcatctgtccgaagaattggatcgcgttaccttcgataagccagtgcgccataccacacacaaacagcatggagacgatcttggccaggctcataccgtgtttgaagatgttgaacgcggcaatgcccacgactacgaccatggcgacggctcgcaccgcggactgaccttcacctgccttgatcgtcgtccattcgaagaggttctgcgattccagtggcagcaggaggaattgatcgagcatgagaggttttcctttcaggaagccgaccgggatggtcccggtactgacgggctggacggcacgggtgtgccgtccggaggcagaaggcgtgacggctggtcgagggaggcaacctcccagcggcctgcacgactgacaagagtcaggccgtactggctggtccgggtggtggattcgtcgccggtgggctggcatgtcacggtcgcggtgacagcgatcttctgccggtctgagggggtggggatctcgtcaggccccaccacatgagtggttttcactgatacgcatggggctgggtcaaccgcggtgaaagcggtccctgggctactccatctcgacaggtcgtcgctgccactcagcatggcggttaggaagcctgaagaggcttgggcggccgggtcggcggtgcgaagctccgaggtgtctagggtgggggctgaggccggtgcaggcatggggatctgtccaggtagacgcaaggcgatggccttgccgttggaatcgacgtggaccgggactgaccaggcctgtccggtcccggattggccgcccatggtgatcactgtgacctgccacaggctcggatcagacggggagacggtagcgtcataggcggtgacggtggtgggcgctggaccaggtttgcggggcatgcgcgcatcggtgatcttggccgccaccaggtgctccagattgtccaagtgcccggagtcagaggtcagcagaagagtagtcacctcgaccgcggtggctgaggcgatctgagctgtgcggcggtcgtgatgggtggtgtcagtgctgacagctgtggtgggagcggatgccggggccgccgaacggaccagggcaacggggccgcatgcgactccgcacaacacgagggcaaggaagcctttggtggccatcgatccggtgtggggccagggacccacgttttcctgtgcctgttttttcttggccgaccaacggcggggcttgggctcagcggatgcactttctgagttacgtactcgtcccaatcgcatcggtcacctccttcactggatgaagggaccaaggaggtgaccgatgtgcggtcga

SEQ ID NO: 208 - DNA, 9744 bp, Propionibacterium acnes
  source 1..9744: mol_type = genomic DNA
gctgacatgcaccgcccattgctagacgctgtgctgtggcatggctggacgtctagcagacgggttgacatcacctttaggctggcagcgcccgaggccgcaggccagaggaagcggacagcctaacgattgacgtccccctctcctttccccaacctcctggagtcgatgacccggagatagatcgatgtctatgcatcggtgcatcgatatacctatgtatctgtctgtggtttttagaggccactcccgtcgccccgggccgctcagcgataccgcaaggctgtgtgggatcagctgcgccgctcccccgacatggcagacagcaccctgcggactgactgacactgtggcgccgcggaggtctcccgcggcgtccgctggggcgagtgcatgcctgtcagctcatcttttatcgtcatgtttccccttgtcagagcgggctttgcaaagtgacaacgttggggggcttgacgacaacgtcctcgacaaccccgaggcggtgatctgtgtcttgtcagatcaaccgcaacgggaaagaggcaccgctgatgttcgccaccacagctaccctcaacgatgaatgggaccagattcgcgccactgagatcgattggcatgactgccccgaactgatgcactgcgtcaccgccgaggatgtgctggccgtcatcccggccgcccccgacgccatcttgggctacctcattacccgagctcaggacggtgacgaattagccacccgcaccatcatccaagcgttcacaggcaagcttattttgatggccacggccaccaaggtgcgccgtactaatgacggcttcaatgatctgctggcggggttgtgggagacgatcatcacgtacccgttggatcgtcgccctgacaagatcgctgcgaacctcaccctcgacacgttgcaccgggttacccggttctggcgtgctgattcccccgatgaggaagacgctcacggtctggtgcccttccctgacactctcatcgccccagagcccgatgaggacgtcacagctagccaggccatcgccttggcggtggaccgcaactggattaccgaggacctagcccgcctcatgagccatatttactgtgacggtatgactggagctgatgcgggtcgtctgcatggctgcgctccagctacggtgcgatctcgatgccgtgatggtcgggccgtgttgcagcgcaacgccgagacgatcctggccgtctgctgatccctctcttgctcatgcctgccgccaccctacccctacctgctagaaacatagccatgtctccagcaacgcatctagcgtatcttctagcaattgatctagctatgtatatagctgatgatctagctatcatatagctgtgtctccagcccaaatgacagcccaatggcatgcttgccacaggaaggtgcgtcagcctcccgaaatactggaaggagctttagcgtgcaggacatgaccagtcctattgaccgatccccgttcgaccgcactattgcggtgtggaaccacaaaggcggcacgttcaagacgtccgtcgtggcgaacctgggatacctgttcgccgccggtggcaacaaggtgttgatggtcgacatggacccccaggccaatctcgacatcgacttcggtatacccgcaggagaacgtgaacggggcatgggattagccgaggcgctacgtgaggggactgtccttcccccaccacagcatctcagcgaaaacctccacctggtcagtggcggcgctgctctcaacgagttcaccgaccccgcatccttagcggccatcatcgaccgagtcaccaccgagcgctacgacctgctagctcaggcccttgccccgctggcctgggactatgacctcatcttcatcgactccgggcctgcccaaactctgctgtcccagaccatccttggagtagcccgctggctggtagtgcccacccgcaccgataacgcctcaatcactggcctcgtcgacgttcaagacgccatcgacggggttgcctcctgcaaccctgaccttcaactactcggcgttgtcctagccggcgtgggggcccgggccacccggatcgccgcagataaacgccacgccatcgacacagtgctgggggcaggaaccgttttcgatgcggtcatccactactccgagaaggtgtccgtgctcgcacgccagcagggcaagaccgtcgccgagctagccaacgagtaccacaacacccagcccgcctacacctacctagctaaaggccagaacatccccaacgtcgccaaggcagccgtcagcatcgaaactgattatctgaggctggccaccgagatcagcgaccgcatgttcaccagcgacgagcaggagcctgatcatgactgacgatccgactccatccgagcagaacaaccccaccagcgacgacatgcgcttggccgaagaatgggccaacagcggccgcacagtgggagccctgccgcgccgtcaacggcctcagcgacccacaccccgcaccaccagccaaccccctgtctcgtcccctgacacaccggctccgaaaaaagcccagaagacccccaccagccagcctggccgtcaacggatcaacgtcaccgtctacgttgtgcccgaactccatgagcggctgcgctcccgatcggcggcgacgggggtgacggtctcggatctggtggtgcatgcgttagcgttcgtcgccgatcatgcgggggaggcgatcgccgatgatctgcgcgtcgagacgggccccggcatgggggccggactgttcgatgtgaccccatcgcggccagtaggggtcgccaaaacccagctgggggtgcgaatgacccgccacaacaagaatggcttggaccagctgacccggacgagtggggcccgtgaccgcagccatcttgtgtctgtcgccgtgcgcgactatctcgactccaaccctgtaaagaaaggccgacatgtccgctgatgaaactcctgccgcccggggtgggcgacgctttgatacgaccgtcaagcccaggcgccgtcccatgcttatcgccgccggtatcgccatcgtgatagtcggcgcgctcctcatcactcagttgattcgctccgcccaaaccgagcatcgcgtgctggaagtccacgccgatgtggctcgcggcgaggtcatccgtgacaccgatctggtatcggtgactgtcggccaggtcgacaacgtatcaacggttcccgcagaccagctcgactcactggtcggcaaacgcgccacggcagatcttcgagccggatcactcttgcctgctggggctatcggcccggccgatgtcgttccagctccgggcaagtcgctggtcgggctgaagctagccgccggacagatccctatcggagaccttgctgccgggacgaagctgcgcctgatccagacgtcggcacccagcggctcatccaccaccactgatagcagcaccaataccgatggccagtcgtgggaggcaacaatggcgaccggcaccaaaaagaccgagcaggtcaccttgatcaacgccgaagtgaactcgcgtgatgccgcccggatcgcccaactgacgtcacagggccgtatcgccgtagtgaaggatccgatccgatgagcaccattgttttgaccagcgtctcgggagccccaggggtcaccacgacagcgatcgggctgggcagggtctggccacaatcgagcctggtcatcgaggatgacacccaccacgccatgctggcgggctacctgcgagcctcccagcacgccgaaccgaacctggccgcagtggcgaacctgacgtcgactccaaccaacgcccaaacggtgtgggaatctatcgccagacccctacccaccgatgacccagtcggcgggctgcgacgcaaaggcatcctcggcccgcccacgccgtggtctcgcgcaggcatcgacccccgatggggattcatgctggccctgtggcggcaactggaggaggctggcatcgacaccatcatcgatttgggtcgcctagccacaccactgacctcaacgccacacctgatcgccgcacccatcgtcgaggacgccgacatgatcttggtgatgatcgaggcgacactacgcgacatcgccggcgcccgcacgatggtggagggactcgctgagcagatgaacttggccggcgcctaccgacgtctcggactgcttgtccaccgtggcggccaggcccgcggcgtcgccgagttcaatgacaaggagatcacctcggcgttacgactcccggtcatcggggccattacccatgacccggccggagccgcccaactctccgacggggtcgggcagcggttcgacaagtcacgtctggcccgctcactatcaaaggtggcggccagcctcgtcgatgccataaacaagcgccacgctgatgacgaggaggatctgtgatggccagttttgctgataatccgttcgacaagctgcgctcccaggatgcggcaagagcttcggtagagcaggagcctgatgccggattagcgtcggagttgttttcggcgtcgtcggggtgggccagctctcagcaggtgtcccaagctcaaccggtgatgacccgttcggagaacgtggattggccggttgtcgcggagctagccagtacggccactgatgaggttgaggctgagatcagccggtggagttccactcatgatggggtggcgacgctagacattcgccaggccatcgcggagcctgctattgcctcggcggtgtctacgtatgctgaccgacgccagatcgatgtaggggagacctggcctgatctggtacgccagcgataccgcaaggctgtgtgggatcagctgttcgggatggggcggttgcagccgctgttcgaaatcagcgacgccgaaaacatcatcgtggtgggtaaccatgaggtggttgtcgaccacaacgatggttcccggtcaacgctgccgccggtggccgactcggatgccgagctggaatcccagatcgcccggatggcgaggaatgcgaccccgcggcgagccttcgacgccgatcacaccgatgtgacgatcatgcaccaacagaagttccgtatccacgcgatctcagcggaagtgtcattgcaaccgtcggtggtcatccgccaacatttgctcacccaaatcagtctgggggatctgtcacatcgcggaatgatgccggtggaagtggcccggttcctcgatgaggcggtacaagctggcaagtccatcgtggtcgccggtgagcagggtgcaggcaagacgacgtttttacgagcgttgatccacgccattccgatgcgggagcggttcgccacgctggagaccgatcaggagttgttcgctcatctgatgcctggccgggaaaacacgctggtgctgttcgcccgtgatggtaacggcgaggtggatccggcgactggcacccagcacggcgctatcgagatcgcccagctgattcctcctagcctgcgccaggcgttaactagggtcattgtcggtgaggtgcgcggcaatgaggcctcggccatgttccaggccatgcagtcgggtacaggcaccatgagcagtatccactccccgcgagcctctgaggtgccgtcccggctagcccaaatgatttcgatgggcccggtctacgatctggatcaggccatgctgcagatcggtcattcgatcgactacatcgtctttgttcgtaagcgtgacctgcctgatgggagccggctgcgatttgttgagcagatccgttcagtctcgcctggtgattcgacaactcccagtcttggcgaggtgtacacggccgatgcgtggaccggtcagccgttgaccccgctcatgcctggttcggccgccgacgagctgtctcacttcgcccgagacctggattactgcgaggcccactcatgaacactcccgcactaaccagcgccctcatcatggccgggctagggctgatcctggccatcgacgggctggtcccggcgccgcctcgacctggggccccgctgagcccggcccagaggtgggccaggctcacccaccgtcccacaggagcggccgggcgccgccgggatttgcgttgggggttggctgttctcgtcggcgtcgtgctgtttgtgctcaccgggtgggtggctgcgctggcgttgggccccatcattgtgttgttggcccccaccctgctgggggcggccccaccgaccgatattccgctgatggaggcgttggatcggtgggtgcgtcaggtcgctgcggtgctgccacaggggcgagacatcatcacagcggtgcggatctcacggccgcgggccccgaagctgatcgccgggtcggtggatcaactggtgtcccggttggatggccgtatggagccgagggaggcgttccagcggatggccgacgagctggactcggctgaggctgacgcggtgctggcctcactagcgttggcggccactcacccgcggggagcctcgacaacgttgaaagctattgctggcaacatccaacagcggttgaaagtgctgcggcaggtggaggctgagcggtctaagccgcgtaactcggtgcgccagatcacactggtcacgatcgccatgttcggggggctgctcgtgatcggacggtcgtttctggccccgctggcgacccctcccggtcaggtgctggtggccgtggcggtggtcatgtatgtcatcgcactagtgcagatgtatcggatggcgcggccccgtcgacgcacccggatcatggttaggaggacccgatgaccattactgctttgtccctgctggtcggggccatcgtcactgtcggactgctggtcatcgtggcagcgttccgcccagccccaggccctgacctgtttgccgctctggaggtggtgtcgggtcgcacctcaagcgtcgccgagaacgtcgaccagacccggatcgggcggataggtcgcagcgtgacccgcacattccatgtgtcggtgtccccggccatgcgggccgcactgcgactccaaggcacgacccccgaagcgttctacggtcgacgcctgatctgcgcactgatcggggcgatcctgccgtggctgctcaacgcggtagccatcgcggtaggggcgaattccccgaacctactcatcccttcggcgctgtgtgtggcgttagctggcgctggatggatgctgccggcagcacggttgaaggctgcggccgggcccaccaacgatgactcgttcgaagcgctgctggtattcatcgatttggtcgtgctggaacggctcgccaacgaaacctccgtcgacgcgctcaccaatgcggcaaacatgtcggactcgccgctattcgtccagatccgtcaagtcctcaaccgtgcctccctggaaaacgtcgacccgtggaacgggctagaccggctagccgaggacatcaaactgcccgaactcaccgatgtggtctccatcgcccgcctccaaaacgaaggcgcctccctcgtcgacagtttccgggcccgagtcgccgagttgcgcgacgcctacctgctgcgcctgcaacaagaatccaccacgatcacccagcggcttggcctgtggacgatcctgcaagccggctcggtcatgctcatcttgctgggggcggccgccctcacactaatcacagccggataaaacgacaccgtgtcgagcccccatatgggccgcgaacctttcataatgatgcctgtaagcaccacaatattgatcacaacctaacaatgaaggagaaatcatgatgaccgatctcgacctggctaaaaaacagatcacctggctggcggcgcacctgcgttcccggatcgttgacgagcgtggcggtggtagctctaccgtggagacactgatttggattggtgtcatcgtggcgctggtgattggtgtgggcgtcggggtgacggcctatatcaggtcgaagatgcctcactgacgacgatgcgtagcaggttcacaactgatcagcgtggcggtggtagcgcgtcggtggggatgctcctgctgatgcctgcgatcatgctgctggcattcggtgggatcgaggtcgggatgtggtgtcacgcccatcagtcgaccatcgcggcagcccaaagcgccgcggaagctcagcgtgtcgtccatccggtcccggggtcggcacaggaggcagcctcgcagatcactagtcatggcggggtgcgtgatacccggatatcggtcagtgatgacggggccactgtcacggtgaccgtggtgggccgggccccatcgatgctggggctgcatcttcctgctgtgtcgtcgacagcgtcgatgcccaaggagcgcctgtcgtgaggcgaagtgagcgcggtggagcaagtctaagcgtcgaggtgctcatgtgggcgccgatcgcgctggtgatcatcgggtttgttgtgggtatcggccggatgtcgatggcccaggacgcggtgagtggcgcggcgggtgctgcggcccgtgcggcgtcgttggagcgtgatggacagtcggctcagtctgcggcgcagcaggcggcgtcggcgaacctgtcgtccggtgggctggcatgtgcgccgagtgtgagcgtggacacgtcagtgtttgcccgtcctgccgggcaggcgggcacggttcacgccacggtcacgtgtgtcacctcgctgggtcttgggttcgggtcccggacggtgcacgcaacggggtctgccccggtagacacctatcgggaaaggagaggctgagatggcccgtgatgagcgtggtggcggctcggtgtcggtgtggatgctgctcatggtgccggtgattctggtcatggccggcctggtttttgacgggtcccgtcagatatcggcaacccaggcggcccaggacgcggcggttgcggcatcccgcgccggaactgatgcggcagcgacaccgcagcttgctggccacgacggggcggccgtagcagtccaagcggcccgccaggcactatctgctgccggggtggacgggtcggtgcaggaggacgggtcgaccatcacggtgaccacgtctcaaagtcggccgacagtgttcctgtcagcgatcggaatcagccaggtaagggggcatgggcaggcccatgctcagcttgtgggaccgggagaacgcccatgacagtgatacgtcgtatcggtgccctggtggcactgctggtggtgatagccggcttaccggccgggctcgtggccgcaggcgccccgctagtaccctcgggcctgtcatgggcccatgtgcggcatctgttggttaccccagacatgaccgggtcggtgctggtgtggctggtcagcctcatcggctggatcgggtgggcatggttcgccctggccgtcgcagccgaagcggtgacgatgctctcagggcagcggctgcactggcacatgcccggccctcgcctagtgcgccgagtggcagccggtcttctcattgccgcgttcgcggccgcaccggcagccacaagcacggctcacgccgccgaggccacccatgtggcggtcgccgcccaggctggaccggcacacgcggccggcacccaggacagccccgccaccacctctcaggccccggacgcctccaccactccgaaaatctggaagacctacacggtgcgggccaacgactacctgtggaagatcgccgagcactactacggtgacg

SEQ ID NO: 209 - DNA, 1127 bp, Propionibacterium acnes
  source 1..1127: mol_type = genomic DNA
accccaactcgcctcaccacacgtcgacctcgacaccgatcaagcgacccgtatcagcgacattgccgtaccgctgacccgcctggtcctctagccacgacaacgcatcccggaacatccgcacgtcttccaaagcgaaaccgcagtcgtagccgcccttgtcccccaaccgcacaatctggcgctcccggtggcctccctcgtcgacttcgatccatagtttcgcgtgcatccgctggccgcggccttctgacaggatctcggtgagcagatcggaggcttgtcctcgcgcatcctcgttgtcgcgagggaattggagtgtgtgggaggaacgacgatgggggaggttggtgacctcgtgacgcagcaggttgcgcttgtgcatctgccgttcgagacgctcgggctgacctgttgacggggttgagccgtggcgccgcttcctcggcggggtctcgatccgttgctcttccggcggttcggcgtcaggttgtggtgcgcgatctcccctaagacgggggggctcgccacctatatccgagggacgatgagacggccttccacgcttgctgcgcactttcgcagcccgccccttgcggtcacatcgacgcggcggcggagtgacgtcctcaccgcgcgctagctgcgtcaacgccgacaccaggttggtgcccggtttcagcccttttagcacgaaccgcaccaggcgggggtctcggccgattcgtcgggcaatctcggcttggctccacccttcggctaacagggtgcgcaacaagtcttgggctcggttatcacgctcagtcactggtcgcctcctcggggagtcctgcctgctcggcctgctctgatagagcagcccgttccgatccggtctggggcgcttccaaagggcccggcaagacacctttgacacgcagccgcccgtccttgccgtcatcgccgcccccctgggccacagggagcgcccaggggggcacgttgctggtgtagatggcgtcgccgtggatagccagcacggtgcgggagttcatgcgtagtgctcctcccttggttgtggcgttttttccggtggtggggtcggcgatgggtgtgttgagggtgcgtacgcgggacagggcccagat

SEQ ID NO: 210 - DNA, 718 bp, Propionibacterium acnes
  source 1..718: mol_type = genomic DNA
ccggggccctgctgctggtgtgggacgtcaccgttttgaccgggcccactctcggccaccgcgtgcgtcctctcagtaaggacgccgagctgactgcccggcgctggctcgaccaggtcgccgacaaccccggcttcctcgacacccttatcgaggccgcccgcatcaccgagggatggcatcacgcgacgcctccgcacattcaggccccttaccggacccttcatcagtgaacggaggtacaacgacatgaccagcgacattgacattgaccggacccacaaacccgacgaccgcgccgaggctcctctttaccgagcctgggccaggagactcgtgcacgtctccgggatgccctggcgtatcgtcgccgccttggccggggtctcccccacctccatgcaccggcttctattcggccgcaacggtcgacccgtggaatggatcggcatcaatgatgctcgcgccctgatggatatcggcatcgatgatctcgcctcagcgtccaccgaccgtatcccggcccgcgaatcccgcgagctgttggtagccctgcacaccctcggctggaccgatgagcatctaagccgctggctgaccagttccgacctcgacctggccaccacccccaaggccctctacgtcacccggctatccgccgcccgcatccaggccacctacgacatgctcatcagccagcccgtccgccgctgcggcc

SEQ ID NO: 211 - DNA, 11765 bp, Propionibacterium acnes
  source 1..11765: mol_type = genomic DNA
ggtcagtgggcgatggccaggccgacgagggcgccgctgcacaggctgggtgcccagggaaggaatcgggcggtgtggtatcggaaccgatcgattagggcatatagggcgatcagggtaagcccggctatgacagtgacctggatcgtgtcgatgccggttgctgcggccggcgctgcccacagtggtgtgatacgcacgtcggagaagccgaagccgcctcgagagatgacccaggcgatcatccacgctgcgaagatgatggtggtagcgatgacagcacgtgttgccgcagtctggtccgagagggcggtaacgactacagccccgatccatccggcccatccggtccacgctagggctgccggtatccatgtggtgatggcgtcaatgacggcaacccatgccccgatggtggctagcagggcccacgtcggccatgtgggtgctggggcccatgctgtggcggtgatcatggtgagtgctgctgcggtacagaccgcgatcaagcttcgggggctgtaggtgtcgcggtaggcgatcttgtcgggattggcggtagctggttcgggcaggatgcgagtgagggcaggccatcctgcggccgcaatagccacgacggcgaccacccacacgatctgttgcatgggtctcatcatggcccatcatcgatgggtgtgggtggccgacatggggtcactcgtcgaggaggtcgaggggtgtgcgggcaagcatggcttcctgtgtgccgagcatgagggtgccagagtcgtcgccggccgattcccagtcgacgatgacctggtcgccgtcaacgctggattcggcgatggtcacccattgcccgtccatgtcgatgagcatcccggcggccagctctgtggcggcaaccgggcggggtgggctgtagaggaggtcgatgtcgcgggcaaggtcgtcgggttcttcggttacctcgggtggggtcgatctggctgtctcggtgtcgtcggccaggtcggctcccaggatgcgttcccattcggggctggttttcttgcccgctgaggccatcgtctcgtcgatctgttcgtcagtgggccacacaaatttctttttggtccaggtcgtggtgtcgggtcgcagctgatccagcagttccaggtcttgcggggagtgggccttgcgggggtcgggggtgtagaagaattggacttccttgggggctgattcgccggataggtaggtgcctcggccgcgtttgccgaacgggatgcccacgccgacgtgttcggagccgaacatcatgcgggctccgtcagcggacaggggtccggtggcggcacgcccggagaagttgtctcggatttcgccgcccaggaactcggcgtcggggcgttgggtccccagatcgacgtggatacggcaggcggctgccatgcgcagcagggagccgatccagccgaaaacggggcattctccgggcatcccagagaccttgatcgttgaccaccagtttttcgcgttgccgtagaactggcggtactcgtcgatgaggaccagcacgcgggtgaagtcggtctcgcgggccccttcttcttcgatgcggcggtagcggtcctccatgagagaccacagccagtggatgagggcgacctggtcggggacggtagtggcgaccatctcgatgttgggccactcccgcaggcccaggtactcgatgcgtttagggtcgatgacgaagacgcgccagttgcggcgggcaccctcgacggcgtcgccgatcatggacaccgtttttccggtacgggtgcggccggccttgagctggtgcgccatgacaccggagatgtcccagaaacaggtgttgccgtcctcgtcgacggcctgggggattttctcccagtctggggagtctgggcccggaagggccacgggtcggggcaccatcgagggcagggggtggcggcgggtgacggtgatggtgtcgtgttccaggtcgaagtcgctgcgccactggccgagcatcatcgccgaggtcaccgcggccaggcgcaattggatgttcgggctggacaaatgggcgccacgttggtggtgaatggtgaagccgtccaggttcccccgatcggttttccaggaatcgacggtgaccgccgacccatagatctgagtggctacttctttagcccgttccttgtctcggtccagatcggttttgtcagggtcaggggtcggggcgcggtattgcaggacgaaccggccggccgggatcgttgcggatgtcaccgtgaactctgccggcgaccaggcagccgcggccgcctgggtgagggccattggcatggtctcgacggcagcctcctcgggggagatggtgagggtcaggcgtcgcggatgcgtcttcttgcgattccatgtgactttctgcctcaccggcaccttcgccgccgactgaatggctaggcgagctgattcggcagtttcggtacgccggccagcgcgtagcgcccgtcgtgcgtgaaggctgcccaccacagcacagcccatacacggcagccaccagcgcggatcagcggctgctgcatagctccccgtagctagtaccgcacctgaccagccggccgcgatacttttccacgccggtttcgcgccaccaggaccagcgttatggacggtctgcttcgaggctgcggagggacgagacagcggagtgctggtcatgccgcggcctccttgtggcaggtcatttcacaggcatgccggccagcgatgatgccgtggcgcaccgccccggtagccgcatagaccgcgcacaactcaaacacggggcacccatcgcaggccgccgggttcatgctttctttgtcccacgatggtgggtcatcggtgcacggcacggccaggccatcctgttgagcggcgctgatagcggtgaataggcgcagctgggcgcgaacttggtctggggtcaggttgacggtgcgggctacacgcatggggttccttcctcttcaccagtgaaggttccctagacccggccgatgtgcggagggatttcagtgttttatcgaggtgaccagccagccggtctgcgctgcgggttcaggtaccagggtcagatgcagcatggtgtggtcggctaggggcacggcgaccaggggcccgtcggcgctcgccccggtgagggtgggagttccggccacggtggtggcgggaatctggttgggtttcgcggccatcagggagcccatgagggtcggggcggcgatctggacgagggcgactttgcgggcggcgggatcgcgggtcaaccagccgcgggtgaaggtgagcgcagccgacgtgatatcggggctcagcggggctggtgtggcggcggggtgggccgttgaggagggccatacgcgcggtagcgctggcgacatcgagcgggtcggagtggggtcaggtgtggggcttagggtccgatgtggcgatggggctaccgccccggtggtgggagacgagactggttgggggtggtgttgagggcgtgggatcagggtgaaggcagccaaactggccgggatgaggatgacggccgcgccgacacttcggagcgaggtcatgtgacgatccttcggtagctcgacgggttgccgtagatcttttccacgttgatgccactatgtgggttgtcggcgctaaccatttggcctccaccgatgtagacggccacgtggtgggcagggcttccccagaggatgaggtcgccgactttgagctggtcacgggccacagcagtgccgactttctgctggtcggcggcggtgcggggaaggctaatgccgatacgccggtacagcgccgaggtcaggcctgagcagtcgtagccgccatcggctttgccgttgccaccccacacgtaggcgtaggagttgttgtcggcgatcgatttggcccatgccacggcttcggccaggttcttcgacacaccggtctcgttagcggccccggtggcacagttgtttgacaggtgccctgtagtagtggatcccactatttgtttggccatggtttcccatttggcgtaggcatcgggcagggctgagccttgcactgcctgagctgcctgcgtcagcggcatcttctgccagtcagcgatgtcgactaaaccgggaatgtggaatccagggccgccggccgatccggggccagcgtaggtgatggtgtggcctttcaagaacgcctcggtggcgtaggcatcattgttgacctgatccagggtcccgtaccagcccggcaggatgcgctgctgaaaggggccggcgtcaccgtcaccgttagccttcgctgaggtagggtcggccccaagatctgattcttgtttggcggtcatgatagcgatgaccgctgcctgggtaggcagtttgtcacgctggaccacagtgacgatggtggtcacgagctgcttctgcctggccgtgaggcctccggcacccacagtgcctccggtgacggtacccacgcaagcatccccgccgacactgccaccgccgccgccagagttgtcgtcgagggccccagagcctactgacagcagcggcacaatgatcacggtcgctggcaagaccgccaggcccgccagcatcagcactgctgcactcaccacggcgatcacgtgagatgctttcaacgctgcccacctctcgctggtttgagggggcgacgcctgctggtacgcacaggcttggttggtccagtccgccgttggttggcaggcctgggtttgatcggcttgctgggacccggtttgggctccggagtcttaggctccggcttcacatgcctaggcacttcggctgcggtgggaggagtcagcacgtggcgtactggcttggtgaccttctgggcacccgaaacaaccggcttagacaccaccttggcacctttgaccaccggtgcggctgccttcgcgccggccttcttgactgcacgatgcgctttgatagccccggcctcggcccggccaaccctgctagcagtagcatcgagggctctgtggcccgtcgttgccctcaccggtgcatccttgccctgacgggcctgcttcgcgatcatcgacataccgccccgcaacgccgaaacacggttgtgagcgtgggcgacggccgacataccagctgtcgtaattttcgactggccctgcggagctcctcccccggtacggatctgacgatatgacgccgaagcacgccgcgccgccgaggccattcgcgccatcttcgcagcccgggtcactcccaccgacgcgccaccggtgactaccgcagccgcagccgaaaccatccgccttcgacccaatccagtgagcttgcgaccaccgctgcgcaccatccggcgagcaccccgcccagcccactggccaatcgccgacgccccttcagagcgcttactacgcatccagtcgttgatcttggccctcagcccctcctcacccttgtgactacgccacagagacaccaagaatccgatgattcccacgatttccaacatgttgacgaccatgaccttgatgacaacgttgccatcagaggcgaagaccgacttgatgacgagcatgaccacgcccaacatcaccatcgacccaacaatgccgatcatcgagtacaagatcgaacacagatcccggataagcgggtctgtgcgaccaggaatagcccgcaacacgttgagcatcgacatgaacgccgaccacaccaacttgcacacgtagaaccagcacatgcccgcgaacaccagcaggattgctgccaaacccgccaccgtcgacgagtaaaagaagaaccccaccaaccaggaaccgtccgcaatatcgccggcgtaatccgacaacccctcgtcacaatcaccaaggtcgtcgcgagcatccgagacgtcatcgtaagggccacccttgagcacctcgatgtacttgtcgtggcacttcgcatcaataatccggccatagttgagctgctgatgaaccggcgccacgaacgagtccacaatgatcgccgacagcttcggagccttcgagtctcccgtcgaggtcatgtcatcaggaacctcaacctcaccagcggtcgccgtcccaggatcaaccgaactagtaatcatccgagacagcgccacaccgaactgctgggtgcgagccaacggagtagccaacgtcgtcgtatcacctgcaaaattcgccaccggggccgccaagaaacccaacgccagcgccgcagcaatcgccgcacgcgcacccgtagcccacgccccagccgtacgtcccctcatcatcttgacgaccacgcccacaccggcgcacgtcgtcagcaacgtcaacaccgttccaccccagctgtccgctcccagcggggccaaaaccttgtcgtggatgtcgttctgcaaccccaccagcggtccggtaatccacccgacccagctcatcgccacggtccagtccaacaaccggcacaacagggcaacgaccatcaggtacgtgttccaacacatgccaataatggaggcccacatagccttcagcggggccgtaacgccaccatcgtccatcgacatctggtactgaaacaagtgaataccgttggagtcagtcacattgaaaccgtcacccatccagcccagcccaggacccgacgccatggcaggcacactgctcagcgccaccaccagaaccagcgtggtgacgatgatacggaaccgccgctccccggccccggggcggcgtggatgacggctcacgctgtctcccggtcgtgctcgggcgggttggagctggcggcttcgcggtggggagcgtaggcaggtctcagtagtcgaatttcaccgacgttgccgtgttggtcggcgtacaggccacaaccggggcctccggggttgagggcaatcttgaccaggtcagcgaactcttcaggggacgttttagggtccacgcccaggaactcgacacctttctgggcgaggttgatgttgtcgcacagcaacacgatgcgatgctgaatgaggttgcggacggtctcgttggggtaatcggcctcggggtcgtgggagccggtgataagccaggcattggctcggcgggattcgcgcacgtactcgtcaatggcgtgggaggcttccggcgaggacgacatgtgatgaaactcgtcaacaatgaaagcggcgtcgcgggcccggtcgctgaagcacaccaggcgagccagacgggcaatgagcgcgtagagggctcggccaaacaccttgtgcgggggcagctgccgaaacaaatgttctgacagcatctcctcggcgttaggaagagcgatgccacaagtgccaatgatgaggatgtcggcactcaggtcggcgggaggaaggtccgggtcaaagatggccgaagctagggaggccgagttctcgatgtcagcgaacacggcaatcctgtcagcgatcgcggtggcctcgggaaggtcgcactcctcggccaggtggcgggccaaacgcccacacgaggtgatctggtggtcacgcatgtaggccggtttgaggaccttggccagcgtggtcccggccacaccgatggtctccaagttaagcaaggtcagcaagaacgactgggcgacctgcccggccatctccgggggaaggatgcgcagcgggtccagcgacagcttggggtgggccgtgtcgacgatctggcgtctaaccccgtcgatagagttgacaaaggttacccactcccgctcatcggagttgtcggtggcaataatgcgcccgccccgggccgcgatggctgcgcacagccgcttctcggccatcgtcttgcccgcgcccatcttgccgatgaacgccaccgtgttgcctttctgatcctgagtgtcggcatgcaaatcgaggtaggccagcgactgcaacggggagcctgtgaccacagccaacgggatgccggtggtacggcccaaccggtactcaaccaccgggatagatgcggcgaacgcggaggcgtgagtcagctgacggtaggcgttaagcgaggaggagaaccggccaccgggccgggcagcccacagcaagtcctcctgacggcccacgggacgcacccacgtgaagtcaccgaacaccggatcattgacgaacgctcctgccagctcctcggtggtctcaaagtcaggagacgagacagtgacggtgataagagcctggatctcgacctcacgctcatcggcggccagctcggcgttgtagtcgacgagcacctgagcggaatgctcgatagacatgagggtcgaagcctgggtcatctcaccgccctcgacgttgtcgagctgatcgaccgtttgacggatagcccgctgatttttctgcatcgcagcgtgacgggtccgggccactccccggatcgccacgtcgaccggcacgccagtgtcgtcgatacggcccaaaaactcgtaggcaggccacgtcatcgtgcggggcaccttacccagcacgatatgggactggtagacggtctcgccggtgtcggcaccgattttgaggacgcgacgattccacgcctgagccgtccgggacatgtgggagactcgcttgtcatcctcgctggccagcaggtcggaggtcgcggcctcatcgatgaccaactcccccagcgcggcacgtccaacctcatccatgagggcgattccctcgccaggggcatcatcacgcaaccgggtcgggtggcctgacaggtgctgccgaagccagatctgttcatcaacggtgaccgggcggggttggaacgctgccggcagtttcgcaccgaattccttagcctgacggagggcccactcccgtgcgacacggccaggagcggtggtcatgagtccggcggcttcggtgattttgttgagggcggcggtccaggcggtgtgggtgcgtattttctggtcttggttgagtttgatcgataggaaccacacgcgccggcctagggattcggtttcaggctggtcgagggtggcgtcgatttcgtcggcccacacggggtgttcgctcaggtcgaggccggcggccatggcgtcgacgatttctgtggggtcggtccaggtgagggctccgttgaggcagaactcgtggcgggcgagggggcggaataggtcgcggtgagctgcggcgacggtgagggaggcgttctcggtgacgggtcgctggaggggagtgagtcgccaggtggcccagatgtcgccggtggaggtccagacgaggttgtcgaagaggaaccgttcggggatggacatcatgactccttttcggcggcggcgaggaaggcttccaggccgctgcggcgtacagcgttcccggtagggtgcaggggttttctgggggtgggttcagatttcgaatgtgggaggggtttgtggatggtatcggtgtcctcggcgagggcttggtcgagcaggcaggtggccggggtgtcggtagtctcgtccagctcgtcgatcatctcgtcgaggaggttgggggtggtggatgcggcccacacaggtgggatagccggtgcgggtcgaggcggtgtggggaggcggagtttggtttggccccagaggggtgtgtgggtcatgccggcgggagtggtggcggcgtgagtggtcacacgccaccagcccgccagccatgccagaggtgaccaggtccagtcgatgcgaccaacaacgaactgggcgagccatccggcagccagcgcgaaaatgaaaccgcggatggtcatgcccccgtcgataattttgaagcccatcatcgcggcaggaactacgccgccgacagcgagcacctgatagatcgtgtagggcccgccaggaatccttcgacctgaggaatccttaccgataatgcggggctgctggcgggcctcggtgtgccactgaatatccacgatcagctctttcccaatccttgcatcatctgtccgaagaattggatcgcgttaccttcgataagccagtgcgccataccacacacaaacagcatggagacgatcttggccaggctcataccgtgtttgaagatgttgaacgcggcaatgcccacgactacgaccatggcgacggctcgcaccgcggactgaccttcacctgccttgatcgtcgtccattcgaagaggttctgcgattccagtggcagcaggaggaattgatcgagcatgagaggttttcctttcaggaagccgaccgggatggtcccggtactgacgggctggacggcacgggtgtgccggccaggggcagaaggcgtgacggctggtcgagggaggcaacctcccagcggcctgcacggctgacaagagtcaggccgtactggctggtccgggtagtggattcgtcgccggtgggctggcatgtcacggtcaccgtgacggtaatcttctgccggtctgagggggtggggacctcgtcaggtcccaccacatgagtggttttcactgatacgcatggggctgggtcaaccgcggtgaaagcggtccctgggctgctccatctcgacaggtcggtattcccggtcagcatggcggttaggaagcctgaagaggcttgggcggccgggtcggcggtgcgaagctccgaggtgtctagggtgggggctgaggccggtgcaggcatggggatctgtccaggtagacgcaaggcgatggccttgccgttggaatcgacgtggaccgggactgaccaggcctgtccgctcccggattggccgcccatggtgaccacggtgacctgccacaggctcggatcagacggggagacggtagcgtcataggcggtgacggtggtgggcgctggaccaggtttgcggggcatgcgcgcatcggtgatcttggccgccaccaggtgttccagattgtccaagtgcccggagtcagaggtcagcagaagagtagtcacctcgaccgcggtggctgaggcgatctgagctgtgcggcggtcgtgatgggtggtgtcagtgctgacagctgtggtgggagcggatgccggggccgccgaacggaccagggcaacggggccgcatgcgactccgcacagcacgagggcaaggaagcctttggtggccatcgatccggtgtggggccagggacccacgttttcctgtgcctgttttttcttggccgaccaacggcgggacttagggttagcggatgcaccttctggggtgcatgctcgtctcaatcgcatcggtcacctccttcactggatgaagggaccaaggaggtgaccgatgtgcggtcgaacccgaaaaagttcaaacttttttctgggtctgcctcaagtacgacagaaggcctgcatcatcacggcgttgtggtagcagatcttgcgtcagcgcaaatgtatgggcctcgtaggagtagctcttaggtgggtcccggtggttgcggccagggcgagggtgtcgggtatgtgtagcgctagtcccgggttcgtggtgtgagggcttttgggtgctgacatgcactacccattgctagacgctgtgctgtggcatggctggacgtctagcagacgggttgacatcacctttaggctggcagcgcccgaggccgcaggccagaggaagcggacagcctaacgattgacgtccccctctcctttccccaacctcctggagtcgatgacccggagatagatcgatgtctatgcatcggtgcatcgatatacctatgtatctgtctgtggtttttagaggccactcccgtcgccccgggccgctcagcgataccgcaaggctgtgtgggatcagct

SEQ ID NO: 212 - DNA, 2055 bp, Propionibacterium acnes
  source 1..2055: mol_type = genomic DNA
gcgagccacgaccatcgccaagctgaatggagagcgagcatgagcaccacccctgccgggttcgacttcgacgctctggccgagtgggccgagagcgatgaggcgacccacaccccgcaaaccagccccgtgttccggggcaaggacgccgcgcgcgccagccgcgcattcctcggccgaggacggcccaccctaggcgcggaccacgccaccggcgagggccggtcgccccgccgtcaggtacggctcgacgcacgcaccaacgcgcgactcgacgcctacgcagccgcaaccggcaccagcgcctcccagatcatccgcgacgccctcgctgactacctgcccgcctgatcccaccccaatccactcgggcgcctgtcagtgccccctcttctgggtggtggtccggggcgtcaccgccccggaccagttgggtagtcatctcagttgaaataagcgattagtgatacgcccctcatgctttccggtgctgtcatgagcgtctgacaacagcgacacctcggggcagccgacggacagtcctctggctgccgctctgatcccatgcccacggcacgaaggtgtcggacagctcggtctcgtcatgtgcccaaatagcgtcgtgggcctgtcgccaagcttctcgggagccccacacgggcacgaccgggccacaccggtgtcctggcctccagtgtcgcgacactgtcgatttcggtacgtgcaatgcggcggcggtttgacggatcgacatcccagactcccgcgcgtcccagatcgccatgtggagagtatttgcctccagtgcggccgccacacttgcacgctctcgcgcacgctcgaatgcccgcctagtgctctcaaatgtcgtcacgacgcctccccctgaaaatactcagggtgtcccacggtgggacaccctgagtatttcataccccaactcgcctcaccacacgtcgacctcgacaccgatcaagcgacccgtatcagcgacattgccgtaccgctgccccgcctggtcctccagccacgacaacgcatcccgaaacagcccgacgtcttccaaagctaaaccacagtcgtagccgcccttgtcccccaaccgcacaatctggcgctcccggtggcctccctcgtcgacctcgatccacagtttcgcgtgcatccgctggcctcggccctctgacaggatctcggtgagcaggtcggacgcctgccctcgcgcatcttcgttactgcgggggaattggagtatgtgggaggaacgatgatgggggaggttggtgacctcatggcgcagcaggttgcgcttgtgcatctgctggtcgagacggtcgggctgacctgttgacggggttgagccgtggcgccgcttcctcggcggggtctcgatccgttgctcttccggcggttcggcgtcaggttgtggtgcgcgatctcccctaggacgggggggctcgccacctatatccgagggacgatgagacggccttccacgcttgctgcgcactttcgcagcccgccccttgcggtcacgtcgacgcggcggcggagtgaggtcctcaccgcgcgctagctgcgtcaacgccgccaccaggttggtgcccggtttcagccctttcagcacgtagcgcagcaggcgggggtctcgcttgattcgtcgagcgatctcattctggctccacccctcggccaccagggtgcgcagcagatcctgggcccggctgtcacgctcagccacggctcaccccctcagggatgcctgcctgctcggcctgctctgacagggctgctcgttccgatccggtctgcggcgcttccagagggccaggcaagacacccttgacacgcagccgaccatccttgccatcgtcgccgcccccctgggccacagagagcgcccaggtaggcacgctgctggtgtagatggcgtcgccgtgaatggccagcagacagcgagttctcaacgctcctcccctggttgtggcgtttttcccggtggcggggtcagcgatgggtgtgttgagggtgcgcacgcgcgacagagcccagata

SEQ ID NO: 213 - DNA, 11284 bp, Propionibacterium acnes
  source 1..11284: mol_type = genomic DNA
gtccacgctagggctgccggtatccatgtggtgatggcgtcaatgacggcaacccatgccccgatggtggctagcagggcccacgtcggccacgtgggtgctggggcccacattgtggcggcgatcatggtgaccgcagccgcggcacagaccgcgatcaagcttcggagactgtaggtgtcgcggtaggcgattttgtcgggggtggcggtggccggttcgggcaggatgcgagtgagggagggccatcctgcggtcgcaatggtcacgacggcggcgatccacacgatctggtgcatgggtctcatcatggcccaatatcgatgggtgtgggtggccgacatgggctcagtcgtcgagaggtttgcgggcggttgtggcttcttgggtgccgaggatgagggtgccggagtcgtcgccggctgattcccagtcgacgatgacctggtcgccgtcaacgctggattcggcgatggtcacccattgcccgtccatgtcgatgagcatcccggcggccaggtctgtgacggcaaccgggtggggtgggctgtagaggaggtcgatgtcgcgggcagggtcgtcgggttcttcggttacctcgggtggggtcgatctggctgtctcggtgtcgtcggccaggtccgctcccaggatgcgttcccattcggggctggttttcttgcccgctgaggccatcgtctcgtcgatctgttcgtcagtgggccacacaaatttctttttggtccaggtcgtggtgtcgggtcgcagctgatccagcagttccaggtcttgcggggagtgggccttgcgggggtcgggggtgtagaagaattggacttccttgggggctgattcgccggataggtaggtgcctcggccgcgtttgccgaacgggatgcccacgccgatgtgttcggagccgaacatcatgcgggctccgtcagcggacaggggtccggtggcggcacgcccggagaagttgtctcggatttcgccgcccaggaactcggcgtcggggcgttgggtccccagatcgacgtggatacggcaggcggctgccatgcgcagcagggagccgatccagccgaaaacggggcattctccgggcatcccagagaccttgatcgttgaccaccagtttttcgcgttgccgtagaactggcggtactcgtcgatgaggaccagcacgcgggtgaagtcggtctcgcgggccccttcttcttcgatgcggcggtagcggtcctccatgagagaccacagccagtggatgagggcgacctggtcggggacggtagtggcgaccatctcgatgttgggccactcccgcaggcccaggtactcgatgcgtttagggtcgatgacgaagacgcgccagttgcggcgggcaccctcgacggcgtcgccgatcatggacaccgtttttccggtacgggtgcggccggccttgagctggtgggccatgacaccggagatgtcccagaaacaggtgttgccgtcctcgtcgacggcctgggggattttctcccagtctggggagtctgggcccggaagggccacgggtcggggcaccatcgagggcagggggtggcggcgggtgacggtgatggtgtcgtgttccaggtcgaagtcgctgcgccactggccgagcatcatcgccgaggtcaccgcggccaggcgcaattggatgttcgggctggacaaatgggcgccacgttggtggtgaatggtgaagccgtccaggttcccccgatcggttttccaggaatcgacggtgaccgccgacccatagatctgagtggctacttctttagcccgttccttgtctcggtccagatcggttttgtcagggtcaggggtcggggcgcggtattgcaggacgaaccggccggccgggatcgttgcggatgtcaccgtgaactctgccggcgaccaggcagccgcggccgcctgggtgagggccattggcatggtctcgacggcagcctcctcgggggggatggtgagggtcaggcgtcgcggatgcgtcttcttgcgattccatgtgactttctgcttcaccggcaccttcgccgccgactgaatggctaggcgagctgattcggcagtttcggtacgccggccagcgcgtagcgcccgtcgtgcgtgaaggctgcccaccacagcacagcccatacacggcagccaccagcgcggatcagcggctgctgcatagcccccggtagctagtaccgcacctgaccagccggccgcgatacttttccacgccggtttcgcgccaccaggaccagcgttatggacggtctgcttcgaggctgcggagggacgagacagcggagtgctggtcatgccgcggcctccttgtggcaggtcatttcacaggcatgccggccagcgatgatgccgtggcgcaccgccccggtagccgcatagaccgcgcacaactcaaacacggggcacccatcgcaggccgccgggttcatgctttctttgtcccacgatggtgggtcatcggtgcacggcacggccaggccatcctgttgagcggcgctgatagcggtgaataggcgcagctgggcgcgaacttggtctggggtcaggttgacggtgcgggctacacgcatggggttccttcctcttcaccagtgaaggttccctagacccggccgatgtgcggagggatttcagtgttttatcgaggtgaccagccagccggtctgcgctgcgggttcaggtaccagggtcagatgcagcatggtgtggtcggctaggggcacggcgaccaggggcccgtcggcgctcgccccggtgagggtgggagttccggccacggtggtggcgggaatctggttgggtttcgcggccatcagggagcccatgagggtcggggcggcgatctggacgagggcgactttgcgggcggcgggatcgcgggtcaaccagccgcgggtgaaggtgagcgcagccgacgtgatatcggggctcagcggggctggtgtggcggcggggtggggcgttgaggagggccatacgcgcggtagcgctggcgacatcgagcgggtcggagtggggtcaggtgtagggcttagggtccgatgtggcgatggggctaccgccccggtggtgggagacgagactggttgggggtggtgttgagggcgtgggatcagggtgaaggcagccaaactggccgggatgaggatgacggccgcgccgacacttcggagcgaggtcatgtgacgatccttcggtagctcgacgggttgccgtagatcttttccacgttgatgccactatgtgggttgtcggcgctaaccatttggcctccaccgatgtagacggccacgtggtgggcagggcttccccagaggatgaggtcgccgactttgagctggtcacgggccaccgcggtgccgactttctgctggtcggcggcggtgcggggaaggctaatgccgatacgccggtacagcgccgaggtcaggcctgagcagtcgtagccgccatcggctttgccgttgccaccccacacgtaggcgtaggagttgttgtcggcgatcgatttggcccatgccacggcttcggccaggttcttcgacacaccggtctcgttagcggccccggtggcacagttgtttgacaggtgccctgtagtagtggatcccactatttgtttggccatggtttcccatttggcgtaggcatcgggcagggctgagccttgcactgcctgagctgcctgcgtcagcggcatcttctgccagtcagcgatgtcgactaaaccgggaatgtggaatccagggccgccggccgatccggggccagcgtaggtgatggtgtggcctttcaagaacgcctcggtggcgtaggcatcattgttgacctgatccagagtcccgtaccagcccggcaggatgcgctgctgaaaggggccggcgtcaccgtcaccgttagccttcgctgaggtagggtcggccccaagatctgattcttgtttggcggtcatgatagcgatgaccgctgcctgggtaggcagtttgtcacgctggaccacagtgacgatggtggtcacgagctgcttctgcctggccgtgaggcctccggcacccacagtgcctccggtgacggtacccacgcaagcatccccgccgacactgccaccgccgccgccagagttgtcgtcgagggccccagagcctactgacagcagcggcacaatgatcacggtcgcgggcaagaccgccaggcccgccagcatcagcactgctgcactcaccacggcgatcacgtgagatgctttcaacgctgcccacctttcgctggtttgagggggcgacgcctgctggtacgcacaggcttggttggtccagtccgccgttggttggcaggcctgggtttgatcggcttgctgggacccggtttgggctccggagtcttaggctccggcttcacatgcctaggcacttcggctgcggtgggaggagtcagcacgtggcgtaccggcttggtgaccttctgggcacccgaaacaaccggcttagacaccaccttggcacctttgaccaccggtgcggctgccttcgcgccggccttcttgactgcacgatgcgctttgatagccccggcctcggcccggccaaccctgctagcagtagcatcgagggctctgtggcccgtcgttgccctcaccggtgcatccttgccctggcgggtctgcttagcgatcgccgacatgccgcctcgcaatgccgaaacatgattgtgggcgtgggcgatcgccgacatgccggccgtcgcgatttttgactggccctgcggggcccctgccccagcacgaatctgctggtaagccgccgacgtgccacgagcacccgccgccattcgcgccaccttcgcagccctagtcactcccgtcgacacgccacccgtggctaccgcagcagcacccgagaccacagtcgaggccatccgccttcgacccaatccggtgagcttgcgaccaccgctgcgcaccatccggcgagcaccccgcccagcccactggccaatcgccgacgccccttcggaacgcttgctgcgcatccaatcgttgatcttgtccctcagccccttctcgcccttgtgacgacgccacatggacatcaagaacccgataatccccacgagctcgagcatgttgacaaccatgaccttgatggcgacatcaccgtcagaggcgaaaaccgacttgatgatgagcatgaccacacccaacatcaccatcgacccgacaatgccgatcatcgagtacaagatcgaacacagatcccggatgagcggatctgtgcggccagggatagcccgcaacacgttgagcatcgacatgaacgccgaccacaccaacttgcacacgtagaaccagcacatgcccgcgaacaccagcaggaccacagccaaacccgccaccgtcgacgagtaaaagaagaaccccaccaaccacgaaccatccgcaatatcgccggcgtaatccgacaacccctcatcacagtcaccaaggtcgtcgcgagcatccgagacgtcatcgtaagggccacccttgagcacctcgatgtacttgtcgtggcacttcgcatcaataatgcggccatagttgagctgctgatgaaccggcgccacgaacgagtccacaatgatcgccgacagcttcggatccttcgagtctcccgtcgaggtcatgtcatcaggaatctcgacctcaccagcggtcgccgtcgcaggatcaaccgaactggtaatcatatgagacagcgccacaccgaactgctgggtgcgagccagcggagtagccaacgtcgtcgtatcgcctgcgaacttcgccaccggggccgccaagaaacccaacgccagcgccgcagcaatcgccgcacgcgcacccgtagcccacgcccctgccgtacgtcccctcatcatcttgacgaccacgcccacaccggcgcacgtcgtcagcaacgtcaacaccgttccaccccagctgtccgctcccagcggggccaaaaccttgtcgtggatgtcgttctgtaaccccaccagcggtccggtaatccacccgacccagctcatcgccacggtccagtccaacaaccggcacaacagggcaatgaccatcaggtacgtgttccaacacatgccaataatggaggcccacatagccttcagcggggccgtaacgccaccatcgtccatcgacatctggtactgaaacaagtgaataccgttggagtcagtcacattgaaaccgtcacccatccagcccagccccgggcccgatgccatggcaggcacactgctcagcgccaccaccagaaccagcgtggtgacgatgatacggaaccgccgctccccggccccggggcggcgtggatgacggctcacgctgtctcctggtcgtgctcgggcgggttggagctggcggcttcgcggtggggagcgtaggcaggtctcagtagtcgaatttcaccgacgttgccgtgttggtcggcgtacaggccacaaccggggcctccggggttgagggcaatcttgaccaggtcagcgaactcttcaggggacgttttagggtccacgcccaggaactcgacacctttctgggcgaggttgatgttgtcgcacagcaacacgatgcgatgctgaatgaggttgcggacggtctcgttggggtaatcggcctcggggtcgtgggagccggtgataagccaggcattggctcggcgggattcgcgcacgtactcgtcaatggcgtgggaggcttccggcgaggacgacatgtgatgaaactcgtcaacaatgaaagcggcgtcgcgggcccggtcgctgaagcacaccaggcgagccagacgggcaatgagcgcgtagagggctcggccaaacaccttgtgcgggggcagctgccgaaacagatgttctgacagcatctcctcggcgttaggaagagcgatgccacaagtgccaatgatgaggatgtcggcactcaggtcggcgggaggaaggtccgggtcaaagatggccgaagctagggaggccgagttctcgatgtcagcgaacacggcaatcctgtcagcgatcgcggtggcctcgggaaggtcgcactcctcggccaggtggcgggccaaacgcccacacgaggtgatctggtggtcacgcatgtaggccggtttgaggaccttggccagcgtggtcccggccacaccgatggtctccaagttaagcaaggtcagcaagaacgactgggcgacctgcccggccatctccgggggaaggatgcgcagcgggtccagcgacagcttggggtgggccgtgtcgacgatctggcgtctaaccccgtcgatagagttgacaaaggttacccactcccgctcatcggagttgtcggtggcaataatgcgcccgccccgggccgcgatggctgcgcacagccgcttctcggccatcgtcttgcccgcgcccatcttgccgatgaacgccaccgtgttgcctttctgatcctgagtgtcggcatgcaaatcgaggtaggccagcgactgcaacggggagcctgtgaccacagccaacgggatgccggtggtacggcccaaccggtactcaaccaccgggatagatgcggcgaacgcggaggcgtgagtcagctgacggtaggcgttaagcgaggaggagaaccggccaccgggccgggcagcccacagcaagtcctcctgacggcccacgggacgcacccacgtgaagtcaccgaacaccggatcattgacgaacgctcctgccagctcctcggtggtctcaaagtcaggagacgagacagtgacggtgataagagcctggatctcgacctcacgctcatcggcggccagctcggcgttgtagtcgacgagcacctgagcggaatgctcgatagacatgagggtcgaagcctgggtcatctcaccgccctcgacgttgtcgagctgatcgaccgtttgacggatagcccgctgatttttctgcatcgcagcgtgacgggtccgggccactccccggatcgccacgtcgaccggcacgccagtgtcgtcgatacggcccaaaaactcgtaggcaggccacgtcatcgtgcggggcaccttacccagcacgatatgggactggtagacggtctcgccggtgtcggcaccgattttgaggacgcgacgattccacgcctgagccgtccgggacatgtgggagactcgcttgtcatcctcgctggccagcaggtcggaggtcgcggcctcatcgatgaccaactcccccagcgcggcacgtccaacctcatccatgagggcgattccctcgccaggggcatcatcacgcaaccgggtcgggtggcctgacaggtgctgccgaagccagatctgttcatcaacggtgaccgggcggggttggaacgctgccggcagtttcgcaccgaattccttagcctgacggagggcccactcccgtgcgacacggccaggagcggtggtcatgagtccggcggcttcggtgattttgttgagggcggcggtccaggcggtgtgggtgcgtattttctggtcttggttgagtttgatcgataggaaccacacgcgccggcctagggattcggtttcaggctggtcgagggtggcgtcgatttcgtcggcccacacggggtgttcgctcaggtcgaggccggcggccatggcgtcgacgatttctgtggggtcggtccaggtgagggctccgttgaggcagaactcgtggcgggcgaggggcggaataggtcgcggtgagctgcggcgacggtgagggaggcgttctcggtgacgggtcgctggaggggagtgagtcgccaggtggcccagatgtcgccggtggaggtccagacgaggttgtcgaagaggaaccgttcggggatggacatcatgactccttttcggcggcggcgaggaaggcttccaggccgctgcggcgtacagcgttcccggtagggtgcaggggttttctgggggtgggttcagatttcgaatgtgggaggggtttgtggatggtatcggtgtcctcggcgagggcttggtcgagcaggcaggtggccggggtgtcggtagtctcgtccagctcgtcgatcatctcgtcgaggaggttgggggtggtggatgcggcccacacaggtgggatagccggtgcgggtcgaggcggtgtggggaggcggagtttggtttggccccagaggggtgtgtgggtcatgccggcgggagtggtggcggcgtgagtggtcacacgccaccagcccgccagccatgccagaggtgaccaggtccagtcgatgcgaccaacaacgaactgggcgagccatccggcagccagcgcgaaaatgaaaccgcggatggtcatgcccccgtcgataattttgaagcccatcattgcggcaggaactacgccgccgacagcgagcacctgatagatcgtgtagggcccgccaggaatccttcgacctgaggaatccttaccgataatgcggggctgctggcgggcctcggtgtgccactgaatatccacgatcagctcttgcccaatccttgcatcatctgtccgaagaattggatcgcgttaccttcgataagccagtgcgccataccacacacaaacagcatggagacgatcttggccaggctcataccgtgtttgaagatgttgaacgcggcaatgcccacgactacgaccatggcgacggctcgcaccgcggactgaccttcacctgccttgatcgtcgtccattcgaagaggttctgcgattccagtggcagcaggaggaattgatcgagcatgagaggttttcctttcaggaagccgaccgggatggtcccggtactgacgggctggacggcacgggtgtgccggccaggggcagaaggcgtgacggctggtcgagggaggcaacctcccagcggcctgcacggctgacaagagtcaggccgtactggctggtccgggtagtggattcgtcgccggtgggctggcatgtcacggtcaccgtgacggtaatcttctgccggtctgagggggtggggacctcgtcaggtcccaccacatgagtggttttcactgatacgcatggggctgggtcaaccgcggtgaaagcggtccctgggctgctccatctcgacaggtcagtattcccggtcagcatggcggttaggaagcctgaagaggcttgggcggccgggtcggcggtgcgaagctccgaggtgtctaaggtgggggccgaggccggtgcaggcatggggatctgtccaggtagacgcaaggcgatggccttgccgttggaatcgacgtggaccgggactgaccaggcctgtccgctcccggattggccgcccatggtgaccacggtgacctgccacaggctcggatcagacggggagacggtagcgtcataggcggtgacggtggggggcgctggaccaggtttgcggggcatgcgcgcatcggtgatcttggccgccaccaggtgttccagattgtccaagtgcccggagtcagaggtcagcagaagagtagtcacctcgaccgcggtggctgaggcgatctgagctgtgcggcggtcgtgatgggtggtgtcagtgctgacagctgtggtgggagcggatgccggggccgccgaacggaccagggcaacggggccgcatgcgactccgcacagcacgagggcaaggaagcctttggtggccatcgatccggtgtggggccagggacccacgttttcctgtgcctgttttttcttggccgaccaacggcgggacttagggttagcggatgcaccttctggggtgcatgctcgtctcaatcgcatcggtcacctccttcactggatgaagggaccaaggaggtgaccgatgtgcggtcgaacccgaaaaagttcaaacttttttctgggtctgcctcaagtacgacagaaggcctgcatcatcacggcgttgtggtagcagatcttgcgtcagcgcaaatgtatgggcctcgtaggagtagctcttaggtgggtcccggtggttgcggccagggcgagggtgtcgggtatgtgtagcgctagtcccgggttcgtggtgtgagggcttttgggtgctgacatgcactacccattgctagacgctgtgctgtggcatggctggacgtctagcagacgggttgacatcacctttaggctggcagcgcccgaggccgcaggccagaggaagcggacagcctaacgattgacgtccccctctcctttccccaacctcctgga

SEQ ID NO: 214 - DNA, 9776 bp, Propionibacterium acnes
  source 1..9776: mol_type = genomic DNA
tgtgtgggatcagctgtgccgctcccccgacatggcagacagcaccgttgcatgagaactgactgacactgtggcgccgcggaggtctcccgcggcgtccgctggggcgagtgcatgcctgtcagctcatcttttatcgtcatgtttccccttgtcagagcggtctttgcaaagtgacaacgtcaggggtcttgacgacaacatcctcgacaacatcgtggcggtggtctgtgtctcgtcagttcaacgcaccggggaaagaggcaccgctgatgttcaccaccacaaacaccctcaacgatgagtgggaccagattcgcgccactgagatcgattggcatgactgccctgaactgatgcactgcatcgacgttgatgatgtgttggccgtcattcctgccgcccccgacgccatcttgggctacctcattgcccgggctcagggcggtgacgagttggccacccgcactatcatccaagcgttcacaggcaagcttatcttgatggccacggccaccaaggtgcgccgtactaatgacggcttcaatgatctgttggcgggtctgtgggagacgatcatcacgtacccgttggatcgtcgccctgacaagatcgctgcgaacctcatcctcgacacgttgcaccgggttacccggttctggcgtgctgattcccccgatgaggaagaggctcacggtctggtgcccttccctgacactctcatcgccccagagcccgatgaggacgtcacagctagccaggccatcgccttggcggtggaccgcaactggattaccgaggacctagcccgcctcatgagccatatttactgtgacggtatgactggagctgatgcgggtcgtctgcatggctgcgctccagctacggtgcgatctcgatgccgtgatggtcgggccgtgttgcagcgcaacgccgagacgatcctggccgtctgctgatccctctcttgctcatgcctgccgccaccctacccctacctgctagaaacatagccatgtctccagcaacgcatctagcatatcttctagcaattgatctagctatgtatatagctgatgatctagctatcatatagctgtgtctccagcccaaaggacagcccaatggcatgcttgccacaggaaggtgcgtcagcctcccgaaatactggaaggagctttaccgtgcaggacatgacctcgaccagaccgattgaccgatccccgttcgaccgcactattgcggtgtggaaccacaaaggcggcacgttcaagacgtccgtcgtggcgaacctgggatacctgttcgccgccggtggcaacaaggtgctgctggtcgacatggacccccaggccaatctcgacattgacttcggtatacccgcgggagaacgtgaacggggcatgggattagccgaggcgctacgtgaggggacggcccttcccccaccgcagcatctcagcgaaaaccttcacctggtcagtggcggcgctgctctcaacgagttcaccgaccccgcatccttagcggccatcctcgaccgagtcaccaccgcacgctacgacctgctagctcaggcccttgccccgctggcctgggactatgacctcatcttcatcgactccgggccggcacaaactctgctgtcccagaccatccttggagtagcccgctggctggtagtgcccacccgcaccgataacgcctcaatcactggcctcgtcgacgttcaagacgccatcgacggggttgcctcctgcaaccctgaccttcaactactcggcgttgtcctagccggcgtgggggcccgggccacccggatcgccgcagataaacgccacgccatcgacacagtgctgggggcaggaaccgttttcgatgcggtcatccactactccgagaaggtgtccgtgctcgcacgccagcagggcaagaccgtcgccgagctagccaacgagtaccacaacacccagcccgcctacacctacctagctaaaggccagaacatccccaacgtcgccaaggcagccgtcagcatcgaaactgattatctgaggctggccaccgagatcagcgaccgcatgttcaccagcgacgagcaggagcctgatcatgactgacgatccgactccatccgagcagaacaaccccaccagcgacgacatgcgcttggccgaagaatgggccaacagcggccgcacagtgggagccctgccgcgccgtcaacggcctcagcgacccacaccccgcaccaccagccaaccccctgtctcgtcccctgacacaccggctccgaaaaaaccccagaagacccccaccagccagcctggccgtcaacggatcaacgtcaccgtctacgttgtgcccgaactccatgagcggctgcgctcccgatcggcggcgacgggggtgacggtctcggatctggtggtgcatgcgttagcgttcgtcgccgatcatgcgggggaggcgatcgccgatgatctgcgcgtcgagacgggccccggcatgggggccggactgttcgatgtgaccccatcgcggccagtaggggtcgccaaaacccagctgggggtgcgaatgacccgccacaacaaggatggtttggaccagctgacccggacgagtggagcccgtgaccgcagccatcttgtgtctgtcgccgtgcgcgactatctcgactccaaccctgtaaagaaaggccgacatgtccgctgatgaaactcctgccgcccggggtgggcgacgctttgatacgaccgtcaagcccaggcgccgtcccatgcttatcgccgccggtatcgccatcgtgatagtcggcgcgctcctcatcactcagttgattcgctccgcccaaaccgagcatcgcgtgctggaagtccacgccgatgtggctcgcggcgaggtcatccgtgacaccgatctggtatcggtgactgtcggccaggtcgacaacgtatcaacggttcccgcagaccagctcgactcactggtcggcaaacgcgccacggcagatcttcgagccggatcactcttgcctgctggggctatcggcccggccgatgtcgttccagctccgggcaagtcgctggtcgggctgaagctagccgccggacagatccctatcggagaccttgctgccgggacgaagctgcgcctgatccagacgtcggcacccagcggctcatccaccaccactgatagcagcaccaataccgatggccagtcgtgggaggcaacaatggcgaccggcaccaaaaagaccgagcaggtcaccttgatcaacgccgaagtgaactcgcgtgatgccgcccggatcgcccaactgacgtcacagggccgtatcgccgtagtgaaggatccgatccgatgagcaccattgttttgaccagcgtctcgggagccccaggggtcaccacgacagcgatcgggctgggcagggtctggccacaatcgagcctggtcgtcgaggatgacacccaccacgccatgctggcgggctacctgcgagcctcccagcacgccgaaccgaacctggccgcagtggcgaacctgacgtcgactccaaccaacgcccaaacggtgtgggaatctatcgccagacccctacccaccgatgacccagtcggcgggctgcgacgcaaaggcatcctcggcccgcccacgccgtggtctcgcgcaggcatcgacccccgatggggattcatgctggccctgtggcggcaactggaggaggctggcatcgacaccatcatcgatttgggtcgcctagccacaccactgacctcaacgccacacctgatcgccgcacccatcgtcgaggacgccgacatgatcttggtgatgatcgaggcgacactacgcgacatcgccggcgcccgcacgatggtggagggactcgctgagcagatgaacttggccggcgcctaccgacgtctcggactgcttgtccaccgtggcggccaggcccgcggcgtcgccgagttcaatgacaaggagatcacctcggcgttacgactcccggtcatcggggccattacccacgacccggccggagccgcccaactctccgacggggtcgggcagcggttcgacaagtcacgtctggcccactcactatcaaaggtggcggccagcctcgtcgatgccataaacaagcgccacgctgatgacgaggaggatctgtgatggccagttttgctgataatccgttcgacaagctgcgctcccaggatgcggcaagagcttcggtagagcaggagcctgatgccggattagcgtcggagttgttttcgacgtcgtcggggtgggccagctctcagcaggtgtcccaagctcaaccggtgatgacccgttcggagaacgtggattggccggttgtcgcggagctagccagtacggccactgatgaggttgaggctgagatcagcaggtggagttccactcatgatggggtggcgacgctagacattcgccaggccatcgcggagcctgctattgcctcggcggtgtctacgtatgctgaccgacgccagatcgatgtaggggagacctggcctgatctggtacgccagcgataccgcaaggctgtgtgggatcagctgttcgggatggggcggttgcagccgctgttcgaaatcagcgacgccgaaaacatcatcgtggtgggtaaccatgaggtggttgtcgaccacaacgatggttcccggtcaacgctgccgccggtggccgactcggatgccgagctggaatcccagatcgcccggatggcgaggaatgcgaccccgcggcgagccttcgacgccgatcacaccgatgtgacgatcatgcaccaacagaagttccgtatccacgcgatctcttcggaggtgtcgttgcaaccgtcggtggtcatccgccaacatttgctcacccaaatcagtctgggggacctgtcccagcggggaatgatgccggtggaagtggcccggttcctcgatgaggcggtacaagctggcaagtccatcgtggtcgccggcgagcagggggcaggcaagacgacgtttttacgagcgttgatccacgccattccgatgcgggagcggttcgccacgttggagaccgatcaggagttgttcgctcatctgatgcctggccgggaaaacacgctggtgctgttcgcccgtgatggtaacggcgaggtggatccggcgactggcacccagcacggcgctatcgagatcgcccagctgattcctcctagcctgcgccaggcgttaactagggtcattgtcggtgaggtgcgcggcaatgaggcttcggccatgttccaggctatgcagtcggggactggcactatgagcagtatccactccccgcgagcctctgaggtgccgtcccggctagcccaaatgatttcgatgggcccggtctacgatctggatcaggccatgctgcagatcggtcattcgatcgactacatcgtctttgttcgtaagcgtgacctgcctgatgggagccggctgcgatttgttgagcagatccgttcagtctcgcctggtgattcgacaactcccagtcttggcgaggtgtacacggctgactcgtggacaggccagccgcttacgccactcatgcctggttcggccgccgacgagctgtctcacttcgcccgagacctggattactgcgaggcccactcatgaacactcccgcactaaccagcgccctcatcgtgaccgggttggggctgatcctggccatcgacgggctggtcccggcgccgcctcgacctggtgccccgctgagcccggcccagaggtgggctcggctcacccaccgtcccacaggagcggccgggcgtcgccgggatttgcgttgggggttggctgttctcgtcggcgtcgtgctgtttgtgctcaccgggtgggtggctgcgctggcgttgggccccatcattgtgttgttggcccccaccctgctgggggcggccccaccgaccgatattccgctgatggaggcgttggatcggtgggtgcgtcaggtcgctgcggtgctgccacaggggcgagacatcatcacagcggtgcggatctcacggccgcgggccccgaagctgatcgccgggtcggtggatcaactggtgtcccggttggatggccgtatggagccgagggaggcgttccagcggatggccgacgagctggactcggctgaggctgacgcggtgctggcctcactagcgttggcggccactcatccgcggggagcctcgacaacgttgaaggctattgctggcaacatccaacagcggttgaaagtgctgcggcaggtggaggctgagcggtctaagccgcgtaactcggtgcgccagatcacactggtcacgatcgccatgttcggggggctgctcgtgatcggacggtcgtttctggccccgctggcgacccctcccggtcaggtgctggtggccgtggcggtggtcatgtatgtcatcgcactagtgcagatgtatcggatggcgcggccccgtcgacgcacccggatcatggtcaggaggacccgatgaccattactgctttgtccctgctggccggggccatcgtcactgtcggactgctggtcatcgtggcagcgttccgcccagccccaggccctgacctggttgccgctctggaggtggtgtcgggtcgcacctcaagcgtcgccgagaacgtcgaccagacccggatcgggcggataggtcgcagcgtgacccgcacattccatgtgtcggtgtccccggccatgcgggccgcactgcgactccaaggcacgacccccgaagcgttctacggtcgacgcctgatctgcgcactgatcggggcgatcctgccgtggctgctcaacgcggtagccatcgcggtaggggcgaattccccgaacctactcatcccttcggcgctgtgtgtggcgttagctggcgctggatggatgctgccggcagcacggttgaaggctgcggccgggcccaccaacgatgactcgttcgaagcgctgctggtattcatcgatttggtcgtgctggaacggctcgccaacgaaacctccgtcgacgcgctcaccaatgcggcaaacatgtcggactcgccgctattcgtccagatccgtcaagtcctcaaccgtgcctccctggaaaacgtcgacccgtggaacgggctagaccggctagccgaggacatcaaactgcccgaactcaccgatgtggtctccatcgcccgcctccaaaacgaaggcgcctccctcgtcgacagtttccgggcccgagtcgccgagttgcgcgacgcctacctgctgcgcctgcaacaagaatccaccgccatcacccagcggcttggtttgtggacgatcctgcaagccggctcggtcatgctcatcttgctgggggcggccgccctcacactcatcacagccggataaaccgacatcgtgtcgagcccccatatgggccgcgaacctttcataatgatgcctgtaagcaccacaatattgatcacaacctaacaatgaaggagaaatcatgatgaccgatctcgacctggctaaaaaacagatcacctggctggcggcgcacctgcgttcccggatcgttgacgagcgtggcggtggtagctctaccgtggagacactgatttggattggtgtcatcgtggcgctggtgattggtgtgggcgtcggggtgacggcctatatcaggtcgaagatgcctcactgacgacgatgcgtagcaggttcacaactgatcagcgtggcggtggtagcgcgtcggtggggatgctcctgctgatgcctgcgatcatgctgctggcattcggtgggatcgaggtcgggatgtggtgtcacgcccatcagtcgaccatcgcggcagcccaaagcgccgcggaggctcagcgtgtcgtccatccggtcccggggtcggcacaggaggcagcctcgcagatcactagtcatggcggggtgcgtgatacccggatatcggtcagtgatgacggggccactgtcacggtgaccgtctcaggtcgggccccatcgatgctggggctgcatcttccggctgtgtcgtcgacagcgtcgatgcccaaggagcgcctgtcgtgaggcgaagtgagcgcggtggagcaagtctaagcgtcgaggtgctcatgtgggcgccgatcgcgctggtgatcatcgggtttgttgtgggtatcggccggatgtcgatggcccaggacgcggtgaatggcgcggcgggtgctgcggcccgtgcggcgtcgttggagcgtgatggacagtcggctcagtctgcggcgcagcaggcggcgtcggcgaacctgtcgtccggtgggctggcatgtgcgccgagtgtgagcgtggacacgtcagtgtttgcccgtcctgccgggcaggcgggcacggttcacgccacggtcacgtgtgtcacctcgctgggtcttgggttcgggtcccggacggtgcacgcaacggggtctgccccggtagacacctatcgggaaaggagaggctgagatggcccgtgatgagcgtggtggcggctcggtgtcggtgtggatgctgctcatggtgccggtgattctggtcatggccggcctggtttttgacgggtcccgtcagatatcggcaacccaggcggcccaggacgcggcggttgcggcatcccgcgccggaactgatgcggcagcgacaccgcagcttgctggccacgacggggcggccgtagcagtccaagcggcccgccaggcactatctgctgccgggggggacgggtcggtgcaggaggacgggtcgaccatcacggtgaccacgtctcaaagtcggccgacagtgttcctgtcagcgatcggaatcagccaggtaagggggcatgggcaggcccatgctcagcttgtgggaccgggagaacgcccatgacagtgatacgtcgtatcggtgccctggtggcactgctggtggtgatagccggcttaccggccgggctcgtggccgcaggcgccccgctagtaccctcgggcctgtcatgggcccatgtgcggcatctgttggttaccccagacatgaccgggtcggtgctggtgtggctggtcagcctcatcggctggatcgggtgggcatggttcgccctggccgtcgcagccgaagcggtgacgatgctctcagggcagcggctgcactggcacatgcccggccctcgcctagtgcgccgagtggcagccggtcttctcattgccgcgttcgcggccgcaccggcagccacaagcacggctcacgccgccgaggccacccatgtggcggtcgccgcccaggctggaccggcacacgcggcccccgcccaggacagccccgtcaccacctctcaggccccggacgcctccaccactccgaaaatctggaagacctacacggtgcgggccaacgactacctgtggaagatcgccgagcactactacggtgacggcgcccaattccgtcgtatcgccgaagcctccggtatcgacccgcactcagagctgaaagtcggccagaaactgatcctgccggttcccgagaacacggccgcagttcattcggttaaagcgggggagtatctgtgggagatcgccgagcactactacggtgacggcgcccagtaccataaaatcgctgaagcttccggtatcgatgcccattccgatctagccgtgggccaaaaactcgtcatccccgggcccctccgccacgacgccacgccgccacaccactcggcgtcgacccacgcgaag

SEQ ID NO: 215 - DNA, 2238 bp, Propionibacterium acnes
  source 1..2238: mol_type = genomic DNA
gacgccggccaccccaactactccgacccacacggtgaccccagctccggcctctgccggccactcgaccagcgacgagcacccactccatacggataccgccgcagcggacaaggccagcaacgaggacgccctgtccccaatccaggtgggtttgaccgccagcgtcggactggtgctggtcgccggactgatcaccaccctcaaccgccgctaccggacccggttcacccgccagccccgcggcaaggccatgaccctgcccagcccggacgcccaaactgccgagatagcgctgcgcagcaccggggcgactgacactctgacgatcacctgcctcgaccaggcgctccgcgcgatcggcgcatggtgccaccactgcgggcacccgctgccacccctgctggccgcccgcgtcgatgacgaccggatcgacctgctgctatcccaggcggcccccgaccatcccgaggcggtggagctggccgccgacggatcggtgtggaccctcaccgccgaccggatcgacgacctgctagcccacaccgatgacaaccaagcggctccgtggccgtctctggtcacactgggacgcgacgacgacggcgcccacatcctcatcgacttggaagccgcaggaaccttgcacctgatcgccgatgacgaccaggtcgacgcggccctcgccgcgatcgccgtggaactggccacctgcgactggtccgacgaagtcaacgtcaccctcgtcggccaggtgtgcccgggcctagaagacgcactagagtctccgaccctgacccgcgccaccgacgtggacaccctcctcaccaccctagaagctcgcgccgacgaccagcgacacatcctcaccgaaggaaaccccctcgccgctcaccgagccgaccccgccatctccgacgggttcgacgccgaagtgatcctcctcgacaccgaactcaccgaagaccaccgcaaccgcctcgccagcctcgtcgaggctcttccccgcgtgtcagtcgccgcggtaacaaccagccccaccagcccagacgaatggtccctcaccctgacaggtgacccactagccgccgacctggctcccctcggctggcacatccacccccaaaccctctcccccgacctgtacaaccgcatggttgaactactcgccaactccgccgccgcagactacgaacccgccagctggtggaaccacgacgccgacgacgagcccaccaccgaccccaccaacgaggaagaatctaccccgagcaggcgagcccgcccgaatatccgcctgaccaccctgaccggcggcatcgacctatccagcgtcgacatcgacgacatcatcgacgaagccaaccaggccctcgacaacaccgaccagaccaccaaccaggttcgcgtcgacaccgaccaacccggcaccgacacccccttccccatcgacgacatcgacccgctgagctccgaccacccggtcctatccatcatcggccaccccgacatcacaggtgccactggaaccgttgggcgctccccgtggcgctgccaacagttggccctctacatcgctgagcatccgggagcatcgggggcgactatcgccgatgatttggggctatcagcgtcgacggtgcgctcgattgctacacacctgcgacactggttgggagccgacgatgccggggtggcttacatgccggcggcgacgcgcggctaccggctcgatgagcggatcgtcacagatgtggacctgatcgacgctgctgtggccggggcaggcattaacaccgctgagacggccacactggtggccattttgaagctgggccgcggacgggtcttcgctggggttcctgactcggaacttcgccagttcagggcgtcgatgtaccacgtggaggcccgcatcgttgatgcggctcttcaggtgacggatcgggctctggaagccggggacttggggctggcccggtgggcgttgacccaagggctactggtgtctcccgatcatgaggacctggtcgccggttgtctgcgcaccgagtaccaggccggcaacatggacaaggtttccgagctggtcgatcacctgtcggctaccgcacgacgcctgggcgtcgatttgagcgccgacaccacccggatcatcgatacggtcacccacgccgacaggagagcgtcatgatctcccctgcactcatctccgtcaggaaggttcctatgcaccat

SEQ ID NO: 216 - DNA, 10907 bp, Propionibacterium acnes
  source 1..10907: mol_type = genomic DNA
ggcttcctgtgcgccgagcatgagggtgccagaatcctcgccagccgattcccagtcgacgatgacctggtcgccgtcaacgctggattcggcgatggtcacccattgcccgtccatgtcgatgagcatcccggcggccagctctgtggcggcaaccgggtgggctgggctgtagaggaggtcgatgtcgcgggcagggtcgtcgggttcttcggttacctcgggtggggtcgatctggctgtctcggtgtcgtcggccaggtcggctcccaggatgcgttcccattcggggctggttttcttgcccgctgaggccatcgtctcgtcgatctgttcgtcagtgggccacacaaatttctttttggtccaggtcgtggtgtcgggtcgcagctgatccagcagttccaggtcttgcggggagtgggccttgcgggggtcgggggtgtagaagaattggacttccttgggggctgattcgccggataggtaggtgccgcggccgcgtttgccgaacgggatgcccacgccgacgtgttcggagccgaacatcatgcgggctccgtcagcggacaggggtccggtggcggcacgcccggagaagttgtctcggatttcgccgcccaggaactcggcgtcggggcgttgggtccccagatcgacgtggatacggcaggcggctgccatgcgcagcagggagccgatccagccgaaaacggggcattctccgggcatcccagagaccttgatcgttgaccaccagtttttcgcgttgccgtagaactggcggtactcgtcgatgaggaccagcacgcgggtgaagtcggtctcgcgggccccttcttcttcgatgcggcggtagcggtcctccatgagagaccacagccagtggatgagggcgacctggtcggggacggtagtggcgaccatctcgatgttgggccactcccgcaggcccaggtactcgatgcgtttagggtcgatgacgaagacgcgccagttgcggcgggcaccctcgacggcgtcgccgatcatggacaccgtttttccggtacgggtgcggccggccttgagctggtgggccatgacaccggagatgtcccagaaacaggtgttgccgtcctcgtcgacggcctgggggattttctcccagtctggggagtctgggcccggaagggccacgggtcggggcaccatcgagggcagggggtggcggcgggtgacggtgatggtgtcgtgttccaggtcgaagtcgctgcgccactggccgagcatcatcgccgaggtcaccgcggccaggcgcaattggatgttcgggctggacaaatgggcgccacgttggtggtgaatggtgaagccgtccaggttcccccgatcggttttccaggaatcgacggtgaccgccgacccatagatctgagtggctacttctttagcccgttccttgtctcggtccagatcggttttgtcagggtcaggggtcggggcgcggtattgcaggacgaaccggccggccgggatcgttgcggatgtcaccgtgaactctgccggcgaccaggcagccgcggccgcctgggtgagggccattggcatggtctcgacggcagcctcctcgggggggatggtgagggtcaggcgtcgcggatgcgtcttcttgcgattccatgtgactttctgcctcaccggcaccttcgccgccgactgaatggctaggcgagctgattcggcagtttcggtacgccggccagcgcgtagcgcccgtcgtgcgtgaaggctgcccaccacagcacagcccatacacggcagccaccagcgcggatcagcggctgctgcatagcccccggtagctagtaccgcacctgaccagccggccgcgatacttttccacgccggtttcgcgccaccaggaccagcgttatggacggtctgcttcgaggctgcggagggacgagacagcggagtgctggtcatgccgcggcctccttgtggcaggtcatttcacaggcatgccggccagcgatgatgccgtggcgcaccgccccggtagccgcatagaccgcgcacaactcaaacacggggcacccatcgcaggccgccgggttcatgctttctttgtcccacgatggtgggtcatcggtgcacggcacggccaggccatcctgttgagcggcgctgatagcggtgaataggcgcagctgggcgcgaacttggtctggggtcaggttgacggtgcgggctacacgcatggggttccttcctcttcaccagtgaaggttccctagacccggccgatgtgcggagggatttcagtgttttatcgaggtgacaagccagccggtctgcgctgcgggttcaggtaccagggtcagatgcagcatggtgtggtcggctaggggcacggcgaccaggggcccgtcggcgctcgccccggtgagggtgggagttccggccacggtggtggcgggaatctggttgggtttcgcggccatcagggagcccatgagggtcggggcggcgatctggacgagggcgactttgcgggcggcgggatcgcgggtcaaccagccgcgggtgaaggtgagcgcagccgacgtgatatcggggctcagcggggctggtgtggcggcggggtgggccgttgaggagggccatacgcgcggtagcgctggcgacatcgagcgggtcggagtggggtcaggtgtggggcttagggtccgatgtggcgatggggctaccgccccggtggtgggagacgagactggttgggggtggtgttgagggcgtgggatcagggtgaaggcagccaaactggccgggatgaggatgacggccgcgccgacacttcggagcgaggtcatgtgacgatccttcggtagctcgacgggttgccgtagatcttttccacgttgatgccactatgtgggttgtcggcgctaaccatttggcctccaccgatgtagacggccacgtggtgggcagggcttccccagaggatgaggtcgccgactttgagctggtcacgggccaccgcggtgccgactttctgctggtcggcggcggtgcggggaaggctaatgccgatacgccggtacagcgccgaggtcaggcctgagcagtcgtagccgccatcggctttgccgttgccaccccacacgtaggcgtaggagttgttgtcggcgatcgatttggcccatgccacggcttcggccaggttcttcgacacaccggtctcgttagcggccccggtggcacagttgtttgacaggtgccctgtagtagtggatcccactatttgtttggccatggtttcccatttggcgtaggcatcgggcagggctgagccttgcactgcctgagctgcctgcgtcagcggcatcttctgccagtcagcgatgtcgactaaaccgggaatgtggaatccagggccgccggccgatccggggccagcgtaggtgatggtgtggcctttcaagaacgcctcggtggcgtaggcatcattgttgacctgatccagagtcccgtaccagcccggcaggatgcgctgctgaaaggggccggcgtcaccgtcaccgttagccttcgctgaggtagggtcggccccaagatctgattcttgtttggcggtcatgatagcgatgaccgctgcctgggtaggcagtttgtcacgctggaccacagtgacgatggtggtcacgagctgcttctgcctggccgtgaggcctccggcacccacagtgcctccggtgacggtacccacgcaagcatccccgccgacactgccaccgccgccgccagagttgtcgtcgagggccccagagcctactgacagcagcggcacaatgatcacggtcgcgggcaagaccgccaggcccgccagcatcagcactgctgcactcaccacggcgatcacgtgagatgctttcaacgctgcccacctttcgctggtttgagggggcgacgcctgctggtacgcacaggcttggttggtccagtccgccgttggttggcaggcctgggtttgatcggcttgctgggacccggtttgggctccggagtcttaggctccggcttcacatgcctaggcacttcggctgcggtgggaggagtcagcacgtggcgtaccggcttggtgaccttctgggcacccgaaacaaccggcttagacaccaccttggcacctttgaccaccggtgcggctgccttcgcgccggccttcttgactgcacgatgcgctttgatagccccggcctcggcccggccaaccctgctagcagtagcatcgagggctctgtggcccgtcgttgccctcaccggtgcatccttgccctggcgggtctgcttagcgatcgccgacatgccgcctcgcaatgccgaaacatgattgtgggcgtgggcgatcgccgacatgccggccgtcgcgatttttgactggccctgcggggcccctgccccagcacgaatctgctggtaagccgccgacgtgccacgagcacccgccgccattcgcgccaccttcgcagccctagtcactcccgtcgacacgccacccgtggctaccgcagcagcacccgagaccacagtcgaggccatccgccttcgacccaatccggtgagcttgcgaccaccgctgcgcaccatccggcgagcaccccgcccagcccactggccaatcgccgacgccccttcggaacgcttgctgcgcatccaatcgttgatcttgtccctcagccccttctcgcccttgtgacgacgccacatggacatcaagaacccgataatccccacgagctcgagcatgttgacaaccatgaccttgatggcgacatcaccgtcagaggcgaaaaccgacttgatgatgagcatgaccacacccaacatcaccatcgacccgacaatgccgatcatcgagtacaagatcgaacacagatcccggatgagcggatctgtgcggccagggatagcccgcaacacgttgagcatcgacatgaacgccgaccacaccaacttgcacacgtagaaccagcacatgcccgcgaacaccagcaggaccacagccaaacccgccaccgtcgacgagtaaaagaagaaccccaccaaccacgaaccatccgcaatatcgccggcgtaatccgacaacccctcatcacagtcaccaaggtcgtcgcgagcatccgagacgtcatcgtaagggccacccttgagcacctcgatgtacttgtcgtggcacttcgcatcaataatgcggccatagttgagctgctgatgaaccggcgccacgaacgagtccacaatgatcgccgacagcttcggatccttcgagtctcccgtcgaggtcatgtcatcaggaatctcgacctcaccagcggtcgccgtcgcaggatcaaccgaactggtaatcatatgagacagcgccacaccgaactgctgggtgcgagccagcggagtagccaacgtcgtcgtatcgcctgcgaacttcgccaccggggccgccaagaaacccaacgccagcgccgcagcaatcgccgcacgcgcacccgtagcccacgcccctgccgtacgtcccctcatcatcttgacgaccacgcccacaccggcgcacgtcgtcagcaacgtcaacaccgttccaccccagctgtccgctcccagcggggccaaaaccttgtcgtggatgtcgttctgtaaccccaccagcggtccggtaatccacccgacccagctcatcgccacggtccagtccaacaaccggcacaacagggcaatgaccatcaggtacgtgttccaacacatgccaataatggaggcccacatagccttcagcggggccgtaacgccaccatcgtccatcgacatctggtactgaaacaagtgaataccgttggagtcagtcacattgaaaccgtcacccatccagcccagccccggacccgatgccatggcaggcacactgctcagcgccaccaccagaaccagcgtggtgacgatgatacggaaccgccgctccccggccccggggcggcgtggatgacggctcacgctgtctcctggtcgtgctcgggcgggttggagctggcggcttcgcggtggggagcgtaggcaggtctcagtagtcgaatttcaccgacgttgccgtgttggtcggcgtacaggccacaaccggggcctccggggttgagggcaatcttgaccaggtcagcgaactcttcaggggacgttttagggtccacgcccaggaactcgacacctttctgggcgaggttgatgttgtcgcacagcaacacgatgcgatgctgaatgaggttgcggacggtctcgttggggtaatcggcctcggggtcgtgggagccggtgataagccaggcattggctcggcgggattcgcgcacgtactcgtcaatggcgtgggaggcttccggcgaggacgacatgtgatgaaactcgtcaacaatgaaagcggcgtcgcgggcccggtcgctgaagcacaccaggcgagccagacgggcaatgagcgcgtagagggctcggccaaacaccttgtgcgggggcagctgccgaaacagatgttctgacagcatctcctcggcgttaggaagagcgatgccacaagtgccaatgatgaggatgtcggcactcaggtcggcgggaggaaggtccgggtcaaagatggccgaagctagggaggccgagttctcgatgtcagcgaacacggcaatcctgtcagcgatcgcggtggcctcgggaaggtcgcactcctcggccaggtggcgggccaaacgcccacacgaggtgatctggtggtcacgcatgtaggccggtttgaggaccttggccagcgtggtcccggccacaccgatggtctccaagttaagcaaggtcagcaagaacgactgggcgacctgcccggccatctccgggggaaggatgcgcagcgggtccagcgacagcttggggtgggccgtgtcgacgatctggcgtctaaccccgtcgatagagttgacaaaggttacccactcccgctcatcggagttgtcggtggcaataatgcgcccgccccgggccgcgatggctgcgcacagccgcttctcggccatcgtcttgcccgcgcccatcttgccgatgaacgccaccgtgttgcctttctgatcctgagtgtcggcatgcaaatcgaggtaggccagcgactgcaacggggagcctgtgaccacagccaacgggatgccggtggtacggcccaaccggtactcaaccaccgggatagatgcggcgaacgcggaggcgtgagtcagctgacggtaggcgttaagcgaggaggagaaccggccaccgggccgggcagcccacagcaagtcctcctgacggcccacgggacgcacccacgtgaagtcaccgaacaccggatcattgacgaacgctcctgccagctcctcggtggtctcaaagtcaggagacgagacagtgacggtgataagagcctggatctcgacctcacgctcatcggcggccagctcggcgttgtagtcgacgagcacctgagcggaatgctcgatagacatgagggtcgaagcctgggtcatctcaccgccctcgacgttgtcgagctgatcgaccgtttgacggatagcccgctgatttttctgcatcgcagcgtgacgggtccgggccactccccggatcgccacgtcgaccggcacgccagtgtcgtcgatacggcccaaaaactcgtaggcaggccacgtcatcgtgcggggcaccttacccagcacgatatgggactggtagacggtctcgccggtgtcggcaccgattttgaggacgcgacgattccacgcctgagccgtccgggacatgtgggagactcgcttgtcatcctcgctggccagcaggtcggaggtcgcggcctcatcgatgaccaactcccccagcgcggcacgtccaacctcatccatgagggcgattccctcgccaggggcatcatcacgcaaccgggtcgggtggcctgacaggtgctgccgaagccagatctgttcatcaacggtgaccgggcggggttggaacgctgccggcagtttcgcaccgaattccttagcctgacggagggcccactcccgtgcgacacggccaggagcggtggtcatgagtccggcggcttcggtgattttgttgagggcggcggtccaggcggtgtgggtgcgtattttctggtcttggttgagtttgatcgataggaaccacacgcgccggcctagggattcggtttcaggctggtcgagggtggcgtcgatttcgtcggcccacacggggtgttcgctcaggtcgaggccggcggccatggcgtcgacgatttctgtggggtcggtccaggtgagggctccgttgaggcagaactcgtggcgggcgaggtggcggaataggtcgcggtgagctgcggcgacggtgagggaggcgttctcggtgacgggtcgctggaggggagtgagtcgccaggtggcccagatgtcgccggtggaggtccagacgaggttgtcgaagaggaaccgttcggggatggacatcatgactccttttcggcggcggcgaggaaggcttccaggccgctgcggcgtacagcgttcccggtagggtgcaggggttttctgggggtgggttcagatttcgaatgtgggaggggtttgtggatggtatcggtgtcctcggcgagggcttggtcgagcaggcaggtggccggggtgtcggtagtctcgtccagctcgtcgatcatctcgtcgaggaggttgggggtggtggatgcggcccacacaggtgggatagccggtgcgggtcgaggcggtgtggggaggcggagtttggtttggccccagaggggtgtgtgggtcatgccggcgggagtggtggcggcgtgagtggtcacacgccaccagcccgccagccatgccagaggtgaccaggtccagtcgatgcgaccaacaacgaactgggcgagccatccggcagccagcgcgaaaatgaaaccgcggatggtcatgcccccgtcgataattttgaagcccatcattgcggcaggaactacgccgccgacagcgagcacctgatagatcgtgtagggcccgccaggaatccttcgacctgaggaatccttaccgataatgcggggctgctggcgggcctcggtgtgccactgaatatccacgatcagctcttgcccaatccttgcatcatctgtccgaagaattggatcgcgttaccttcgataagccagtgcgccataccacacacaaacagcatggagacgatcttggccaggctcataccgtgtttgaagatgttgaacgcggcaatgcccacgactacgaccatggcgacggctcgcaccgcggactgaccttcacctgccttgatcgtcgtccattcgaagaggttctgcgattccagtggcagcaggaggaattgatcgagcatgagaggttttcctttcaggaagccgaccgggatggtcccggtactgacgggctggacggcacgggtgtgccggccaggggcagaaggcgtgacggctggtcgagggaggcaacctcccagcggcctgcacggctgacaagagtcaggccgtactggctggtccgggtagtggattcgtcgccggtgggctggcatgtcacggtcaccgtgacggtaatcttctgccggtctgagggggtggggacctcgtcaggtcccaccacatgagtggttttcactgatacgcatggggctgggtcaaccgcggtgaaagcggtccctgggctgctccatctcgacaggtcagtattcccggtcagcatggcggttaggaagcctgaagaggcttgggcggccgggtcggcggtgcgaagctccgaggtgtctagggtgggggccgaggccggtgcaggcatggggatctgtccaggtagacgcaaggcgatggccttgccgttggaatcgacgtggaccgggactgaccaggcctgtccgctcccggattggccgcccatggtgaccacggtgacctgccacaggctcggatcagacggggagacggtagcgtcataggcggtgacggtggtgggcgctggaccaggtttgcggggcatgcgcgcatcggtgatcttggccgccaccaggtgttccagattgtccaagtgcccggagtcagaggtcagcagaagagtagtcacctcgaccgcggtggctgaggcgatctgagctgtgcggcggtcgtgatgggtggtgtcagtgctgacagctgtggtgggagcggatgccggggccgccgaacggaccagggcaacggggccgcatgcgactccgcacagcacgagggcaaggaagcctttggtggccatcgatccggtgtggggccagggacccacgttttcctgtgcctgttttttcttggccgaccaacggcgggacttagggttagcggatgcaccttctggggtgcatgctcgtctcaatcgcatcggtcacctccttcactggatgaagggaccaaggaggtgaccgatgtgcggtcgaacccgaaaaagttcaaacttttttctgggtctgcctcaagtacgacagaaggcctgcatcatcacggcgttgtggtagcagatcttgcgtcagcgcaaatgtatgggcctcgtaggagtagctcttaggtgggtcccggtggttgcggccagggcgagggtgtcgggtatgtgtagcgctagtcccgggttcgtggtgtgagggcttttgggtgctgacatgcactacccattgctagacgctgtgctgtggcatggctggacgtctagcagacgggttgacatcacctttaggctggcagcgcccgaggccgcaggccagaggaagcggacagcctaacgattgacgtccccctctcctttccccaacctcctgga

SEQ ID NO: 217 - DNA, 9469 bp, Propionibacterium acnes
  source 1..9469: mol_type = genomic DNA
tgtgtgggatcagctgtgccgctcccccgacatggcagacagcaccgttgcatgagaactgactgacactgtggcgccgcggaggtctcccgcggcgtccgctggggcgagtgcatgcctgtcagctcatcttttatcgtcatgtttccccttgtcagagcggtctttgcaaagtgacaacgtcaggggtcttgacgacaacatcctcgacaacatcgtggcggtggtctgtgtctcgtcagttcaacgcaccggggaaagaggcaccgctgatgttcaccaccacaaacaccctcaacgatgagtgggaccagattcgcgccactgagatcgattggcatgactgccctgaactgatgcactgcatcgacgttgatgatgtgttggccgtcattcctgccgcccccgacgccatcttgggctacctcattgcccgggctcagggcggtgacgagttggccacccgcactatcatccaagcgttcacaggcaagcttatcttgatggccacggccaccaaggtgcgccgtactaatgacggcttcaatgatctgttggcgggtctgtgggagacgatcatcacgtacccgttggatcgtcgccctgacaagatcgctgcgaacctcatcctcgacacgttgcaccgggttacccggttctggcgtgctgattcccccgatgaggaagaggctcacggtctggtgcccttccctgacactctcatcgccccagagcccgatgaggacgtcacagctagccaggccatcgccttggcggtggaccgcaactggattaccgaggacctagcccgcctcatgagccatatttactgtgacggtatgactggagctgatgcgggtcgtctgcatggctgcgctccagctacggtgcgatctcgatgccgtgatggtcgggccgtgttgcagcgcaacgccgagacgatcctggccgtctgctgatccctctcttgctcatgcctgccgccaccctacccctacctgctagaaacatagccatgtctccagcaacgcatctagcatatcttctagcaattgatctagctatgtatatagctgatgatctagctatcatatagctgtgtctccagcccaaaggacagcccaatggcatgcttgccacaggaaggtgcgtcagcctcccgaaatactggaaggagctttaccgtgcaggacatgacctcgaccagaccgattgaccgatccccgttcgaccgcactattgcggtgtggaaccacaaaggcggcacgttcaagacgtccgtcgtggcgaacctgggatacctgttcgccgccggtggcaacaaggtgctgctggtcgacatggacccccaggccaatctcgacattgacttcggtatacccgcgggagaacgtgaacggggcatgggattagccgaggcgctacgtgaggggacggcccttcccccaccgcagcatctcagcgaaaaccttcacctggtcagtggcggcgctgctctcaacgagttcaccgaccccgcatccttagcggccatcctcgaccgagtcaccaccgcacgctacgacctgctagctcaggcccttgccccgctggcctgggactatgacctcatcttcatcgactccgggccggcacaaactctgctgtcccagaccatccttggagtagcccgctggctggtagtgcccacccgcaccgataacgcctcaatcactggcctcgtcgacgttcaagacgccatcgacggggttgcctcctgcaaccctgaccttcaactactcggcgttgtcctagccggcgtgggggcccgggccacccggatcgccgcagataaacgccacgccatcgacacagtgctgggggcaggaaccgttttcgatgcggtcatccactactccgagaaggtgtccgtgctcgcacgccagcagggcaagaccgtcgccgagctagccaacgagtaccacaacacccagcccgcctacacctacctagctaaaggccagaacatccccaacgtcgccaaggcagccgtcagcatcgaaactgattatctgaggctggccaccgagatcagcgaccgcatgttcaccagcgacgagcaggagcctgatcatgactgacgatccgactccatccgagcagaacaaccccaccagcgacgacatgcgcttggccgaagaatgggccaacagcggccgcacagtgggagccctgccgcgccgtcaacggcctcagcgacccacaccccgcaccaccagccaaccccctgtctcgtcccctgacacaccggctccgaaaaaaccccagaagacccccaccagccagcctggccgtcaacggatcaacgtcaccgtctacgttgtgcccgaactccatgagcggctgcgctcccgatcggcggcgacgggggtgacggtctcggatctggtggtgcatgcgttagcgttcgtcgccgatcatgcgggggaggcgatcgccgatgatctgcgcgtcgagacgggccccggcatgggggccggactgttcgatgtgaccccatcgcggccagtaggggtcgccaaaacccagctgggggtgcgaatgacccgccacaacaaggatggtttggaccagctgacccggacgagtggagcccgtgaccgcagccatcttgtgtctgtcgccgtgcgcgactatctcgactccaaccctgtaaagaaaggccgacatgtccgctgatgaaactcctgccgcccggggtgggcgacgctttgatacgaccgtcaagcccaggcgccgtcccatgcttatcgccgccggtatcgccatcgtgatagtcggcgcgctcctcatcactcagttgattcgctccgcccaaaccgagcatcgcgtgctggaagtccacgccgatgtggctcgcggcgaggtcatccgtgacaccgatctggtatcggtgactgtcggccaggtcgacaacgtatcaacggttcccgcagaccagctcgactcactggtcggcaaacgcgccacggcagatcttcgagccggatcactcttgcctgctggggctatcggcccggccgatgtcgttccagctccgggcaagtcgctggtcgggctgaagctagccgccggacagatccctatcggagaccttgctgccgggacgaagctgcgcctgatccagacgtcggcacccagcggctcatccaccaccactgatagcagcaccaataccgatggccagtcgtgggaggcaacaatggcgaccggcaccaaaaagaccgagcaggtcaccttgatcaacgccgaagtgaactcgcgtgatgccgcccggatcgcccaactgacgtcacagggccgtatcgccgtagtgaaggatccgatccgatgagcaccattgttttgaccagcgtctcgggagccccaggggtcaccacgacagcgatcgggctgggcagggtctggccacaatcgagcctggtcgtcgaggatgacacccaccacgccatgctggcgggctacctgcgagcctcccagcacgccgaaccgaacctggccgcagtggcgaacctgacgtcgactccaaccaacgcccaaacggtgtgggaatctatcgccagacccctacccaccgatgacccagtcggcgggctgcgacgcaaaggcatcctcggcccgcccacgccgtggtctcgcgcaggcatcgacccccgatggggattcatgctggccctgtggcggcaactggaggaggctggcatcgacaccatcatcgatttgggtcgcctagccacaccactgacctcaacgccacacctgatcgccgcacccatcgtcgaggacgccgacatgatcttggtgatgatcgaggcgacactacgcgacatcgccggcgcccgcacgatggtggagggactcgctgagcagatgaacttggccggcgcctaccgacgtctcggactgcttgtccaccgtggcggccaggcccgcggcgtcgccgagttcaatgacaaggagatcacctcggcgttacgactcccggtcatcggggccattacccacgacccggccggagccgcccaactctccgacggggtcgggcagcggttcgacaagtcacgtctggcccactcactatcaaaggtggcggccagcctcgtcgatgccataaacaagcgccacgctgatgacgaggaggatctgtgatggccagttttgctgataatccgttcgacaagctgcgctcccaggatgcggcaagagcttcggtagagcaggagcctgatgccggattagcgtcggagttgttttcgacgtcgtcggggtgggccagctctcagcaggtgtcccaagctcaaccggtgatgacccgttcggagaacgtggattggccggttgtcgcggagctagccagtacggccactgatgaggttgaggctgagatcagcaggtggagttccactcatgatggggtggcgacgctagacattcgccaggccatcgcggagcctgctattgcctcggcggtgtctacgtatgctgaccgacgccagatcgatgtaggggagacctggcctgatctggtacgccagcgataccgcaaggctgtgtgggatcagctgttcgggatggggcggttgcagccgctgttcgaaatcagcgacgccgaaaacatcatcgtggtgggtaaccatgaggtggttgtcgaccacaacgatggttcccggtcaacgctgccgccggtggccgactcggatgccgagctggaatcccagatcgcccggatggcgaggaatgcgaccccgcggcgagccttcgacgccgatcacaccgatgtgacgatcatgcaccaacagaagttccgtatccacgcgatctcttcggaggtgtcgttgcaaccgtcggtggtcatccgccaacatttgctcacccaaatcagtctgggggacctgtcccagcggggaatgatgccggtggaagtggcccggttcctcgatgaggcggtacaagctggcaagtccatcgtggtcgccggcgagcagggggcaggcaagacgacgtttttacgagcgttgatccacgccattccgatgcgggagcggttcgccacgttggagaccgatcaggagttgttcgctcatctgatgcctggccgggaaaacacgctggtgctgttcgcccgtgatggtaacggcgaggtggatccggcgactggcacccagcacggcgctatcgagatcgcccagctgattcctcctagcctgcgccaggcgttaactagggtcattgtcggtgaggtgcgcggcaatgaggcttcggccatgttccaggctatgcagtcggggactggcactatgagcagtatccactccccgcgagcctctgaggtgccgtcccggctagcccaaatgatttcgatgggcccggtctacgatctggatcaggccatgctgcagatcggtcattcgatcgactacatcgtctttgttcgtaagcgtgacctgcctgatgggagccggctgcgatttgttgagcagatccgttcagtctcgcctggtgattcgacaactcccagtcttggcgaggtgtacacggctgactcgtggacaggccagccgcttacgccactcatgcctggttcggccgccgacgagctgtctcacttcgcccgagacctggattactgcgaggcccactcatgaacactcccgcactaaccagcgccctcatcgtgaccgggttggggctgatcctggccatcgacgggctggtcccggcgccgcctcgacctggtgccccgctgagcccggcccagaggtgggctcggctcacccaccgtcccacaggagcggccgggcgtcgccgggatttgcgttgggggttggctgttctcgtcggcgtcgtgctgtttgtgctcaccgggtgggtggctgcgctggcgttgggccccatcattgtgttgttggcccccaccctgctgggggcggccccaccgaccgatattccgctgatggaggcgttggatcggtgggtgcgtcaggtcgctgcggtgctgccacaggggcgagacatcatcacagcggtgcggatctcacggccgcgggccccgaagctgatcgccgggtcggtggatcaactggtgtcccggttggatggccgtatggagccgagggaggcgttccagcggatggccgacgagctggactcggctgaggctgacgcggtgctggcctcactagcgttggcggccactcatccgcggggagcctcgacaacgttgaaggctattgctggcaacatccaacagcggttgaaagtgctgcggcaggtggaggctgagcggtctaagccgcgtaactcggtgcgccagatcacactggtcacgatcgccatgttcggggggctgctcgtgatcggacggtcgtttctggccccgctggcgacccctcccggtcaggtgctggtggccgtggcggtggtcatgtatgtcatcgcactagtgcagatgtatcggatggcgcggccccgtcgacgcacccggatcatggtcaggaggacccgatgaccattactgctttgtccctgctggccggggccatcgtcactgtcggactgctggtcatcgtggcagcgttccgcccagccccaggccctgacctggttgccgctctggaggtggtgtcgggtcgcacctcaagcgtcgccgagaacgtcgaccagacccggatcgggcggataggtcgcagcgtgacccgcacattccatgtgtcggtgtccccggccatgcgggccgcactgcgactccaaggcacgacccccgaagcgttctacggtcgacgcctgatctgcgcactgatcggggcgatcctgccgtggctgctcaacgcggtagccatcgcggtaggggcgaattccccgaacctactcatcccttcggcgctgtgtgtggcgttagctggcgctggatggatgctgccggcagcacggttgaaggctgcggccgggcccaccaacgatgactcgttcgaagcgctgctggtattcatcgatttggtcgtgctggaacggctcgccaacgaaacctccgtcgacgcgctcaccaatgcggcaaacatgtcggactcgccgctattcgtccagatccgtcaagtcctcaaccgtgcctccctggaaaacgtcgacccgtggaacgggctagaccggctagccgaggacatcaaactgcccgaactcaccgatgtggtctccatcgcccgcctccaaaacgaaggcgcctccctcgtcgacagtttccgggcccgagtcgccgagttgcgcgacgcctacctgctgcgcctgcaacaagaatccaccgccatcacccagcggcttggtttgtggacgatcctgcaagccggctcggtcatgctcatcttgctgggggcggccgccctcacactcatcacagccggataaaccgacatcgtgtcgagcccccatatgggccgcgaacctttcataatgatgcctgtaagcaccacaatattgatcacaacctaacaatgaaggagaaatcatgatgaccgatctcgacctggctaaaaaacagatcacctggctggcggcgcacctgcgttcccggatcgttgacgagcgtggcggtggtagctctaccgtggagacactgatttggattggtgtcatcgtggcgctggtgattggtgtgggcgtcggggtgacggcctatatcaggtcgaagatgcctcactgacgacgatgcgtagcaggttcacaactgatcagcgtggcggtggtagcgcgtcggtggggatgctcctgctgatgcctgcgatcatgctgctggcattcggtgggatcgaggtcgggatgtggtgtcacgcccatcagtcgaccatcgcggcagcccaaagcgccgcggaggctcagcgtgtcgtccatccggtcccggggtcggcacaggaggcagcctcgcagatcactagtcatggcggggtgcgtgatacccggatatcggtcagtgatgacggggccactgtcacggtgaccgtctcaggtcgggccccatcgatgctggggctgcatcttccggctgtgtcgtcgacagcgtcgatgcccaaggagcgcctgtcgtgaggcgaagtgagcgcggtggagcaagtctaagcgtcgaggtgctcatgtgggcgccgatcgcgctggtgatcatcgggtttgttgtgggtatcggccggatgtcgatggcccaggacgcggtgaatggcgcggcgggtgctgcggcccgtgcggcgtcgttggagcgtgatggacagtcggctcagtctgcggcgcagcaggcggcgtcggcgaacctgtcgtccggtgggctggcatgtgcgccgagtgtgagcgtggacacgtcagtgtttgcccgtcctgccgggcaggcgggcacggttcacgccacggtcacgtgtgtcacctcgctgggtcttgggttcgggtcccggacggtgcacgcaacggggtctgccccggtagacacctatcgggaaaggagaggctgagatggcccgtgatgagcgtggtggcggctcggtgtcggtgtggatgctgctcatggtgccggtgattctggtcatggccggcctggtttttgacgggtcccgtcagatatcggcaacccaggcggcccaggacgcggcggttgcggcatcccgcgccggaactgatgcggcagcgacaccgcagcttgctggccacgacggggcggccgtagcagtccaagcggcccgccaggcactatctgctgccggggtggacgggtcggtgcaggaggacgggtcgaccatcacggtgaccacgtctcaaagtcggccgacagtgttcctgtcagcgatcggaatcagccaggtaagggggcatgggcaggcccatgctcagcttgtgggaccgggagaacgcccatgacagtgatacgtcgtatcggtgccctggtggcactgctggtggtgatagccggcttaccggccgggctcgtggccgcaggcgccccgctagtaccctcgggcctgtcatgggcccatgtgcggcatctgttggttaccccagacatgaccgggtcggtgctggtgtggctggtcagcctcatcggctggatcgggtgggcatggttcgccctggccgtcgcagccgaagcggtgacgatgctctcagggcagcggctgcactggcacatgcccggccctcgcctagtgcgccgagtggcagccggtcttctcattgccgcgttcgcggccgcaccggcagccacaagcacggctcacgccgccgaggccacccatgtggcggtcgccgcccaggctggaccggcacacgcggcccccgcccaggacagccccgccaccacctctcaggccccggacgcctccaccactccgaaaatctggaagacctacacggtgcgggccaacgactacctgtggaagatcgccgagcactactacggtga

SEQ ID NO: 218 - DNA, 2098 bp, Propionibacterium acnes
  source 1..2098: mol_type = genomic DNA
ttggtattggtaggcgatggtgtcaccggttttgttgcggatgacgtcgaagccttcgatgtcggaggggatgtcgtcggcgtcgtagacgacggtggtggtgacggggttggaggccgacatttggccgatggtcacgcgcagcatgtttttcaacgcggaggtgaggattgtcgtggcggtggggtttttgtctgcccagcgtttctcggcgatgtcgatcatgtcttggatggttttgacccatcctcggatgggatcgactttggtcagtttgatcccttcgaggaactcgatgggctgggtgatgggcccatccggtccggcttcggtgtcccagccttcgtcgatggctagtttcagttcggcggtatcgacccatgtttcgtgggtggtgccgggcacgttgggccaaaaccatcctgctcgtcctttggtgcgtttgaccggtagtaggccgatgtcgtcccaccaggatggcacggtgaagcggatgtggtagcgggccgggtgccaggggttgttggtgaacaggtcgcgggcttcggtggcgctgagcagagtggcgggtgcggcaccgatctctccggtcactgatccggcatacatgaatcggccgtcgatgtacacgaagttagggatagggccggcaggcacggtggggcgccagcccttttcgcggtcctcggggttgccgtcgtcgacgcatagttcgtagcggtgctgaggggaggtgtgttggatgagtgcgcccagttcggggtccatcggctccatgcgataggactcgggggtccgtagcttccagaggttgattccttctgctccggggcggtccatgagggcccagtcgcggtcgattctggtggcgatgatgtgggtcagttctcgccatgcccagcgggcctggattggggtgagggtctggccagggaaccattcatcagcgaccagaatgtcgaggttgcggtcggtttctttgtgggtgaaccggcctcgggcgggccgcccggacagcatgaacaggccccgcacgtgccagtcctggttgaactcgcgggtgtgagcgggggtgtcaggcagcagccaggattgaggctggtcggggatgttaccgcagacgatcaggcgtcgggcgttgtggtgtagcgcggttgttagcaggtctgacagggtcgcgtgcttggtgcgtcgtccccccagcactggcaggatctcgtttccggccgcgtcgactccccgggcggtgtcgatgtctagccacactgtttcggggtcggggggccgatgtggggcgggacggcgctgctcctggtcgtctctcatggtttcctcctttgggccagggagcggccggcgtcgagggcgttcatgcgctcgcgttgttcttcgcgtagttggtagacccggcctcgtgacactcctgctgcctcggcgatggtggtggccggcaggtggccgatggcggcagcgtcggcaaggacgtcacgccaggccaggtcaatggttcccagctgggctagagcttcgtcgcggcggcgggtggcatcagccactacggaggcccaccctgtggggtggatggtcttgacgacgattcggttgtggcggatggggccccatgcatcagcggggacttgccagccgtgattggcggcggactcggtgatcttgaggcgtcgctcaggtgcgcgggtgcgggcagtgacgtcggtgttccaggtctggactggtacccacgtcccctctcggatgcgttcgatgacgcacgtggtgacctcgtcggtgactgtgatgaccagacgataatctttcccgtctggggtggttcggtagctgggcatgtcaccctcccctatctgtcaaatgagctagacacagtgtctatttaatttgacgcaaagtcaagtgtgctagacgcctttgtgtggatccgcccgcccagacaggcactcacgtctcatgacccgccgcgacgtcttaacgaaaccaaaccgcttatagaaccgctccgcagcgggcccggagggcttcagttcgagggtgagaccttgctggtcggcccattggcagacttgtgtgaggatctgtgagccgt

SEQ ID NO: 219 - DNA, 1726 bp, Propionibacterium acnes
  source 1..1726: mol_type = genomic DNA
cctcgctgactacctgcccgcctgatcccaccccaatccactcgggcgcctgtcagtgccccctcttctgggtggtggtccggggcgtcaccgccccggaccagttgggtagtcatctcagttgaaataagcgattagtgatacgcccctcctgctttccggtgctgtcatgagcgtctgacaacagcgacacctcggggcagccgacggacagtcctctggctgccgctctgatcccatgcccacggcacgaaggtgtcggacagctcggtctcgtcatgtgcccaaatagcgtcgtgggcctgtcgccaagcttctcgggagccccacacgggcacgaccgggccacaccggtgtcctggtctccagtgtcgcgacactgtcgatttcggtacgtgcaatgcggcggcggtttgacggatcgacatcccagactcccgcgcgtcccagatcgccatgtggagagtatttgcctccagtgcggccgccacacttgcacgctctcgcgcacgctcgaatgcccgcctagtgctctcaaatgtcgtcacgacgcctccccctgaaaatactcagggtgtcccacggtgggacaccctgagtatttcataccccaactcgcctcaccacacgtcgacctcgacaccgactagccgacccctatcggcgacattgccatactgctgacccgcctggtcctctagccacgacaacgcatcccgaaacagcccgacgtcttccaaagctaaaccgcagtcgtagccgcccttgtcccccaaccgcacaatctggcgctcccgacggccaccttcatcgacttcgatccatagtttcgcgtgcatccgctggccgcggccttctgacaggatctcggtgagcagatcggaggctcgcatcctcgttaccgcgagggaattggagtgtgtgggaggaacgacgatgggggaggttggtgacctcgtgacgcagcaggttgcgcttgtgcatctgccgttcgaggcgctcgggctgactcgttgacggggttgtgccgtggcgccgcttcctcggcggggtctcgatccgttgctcttccggcggttcggcgtcaggttgtggtgcgcgatctcccctaggacgggggggctcaccacctatatccgagggacgatgagacggccttccacgcttgctgcgcactttcgcagcccgccccttgcggtcacatcgacgcggcggcggggtaacctcctcgccccgctccaactgtgttaacgccgccaccaggttggtgcccggtttcagcccttttagcacgaaccgcaccaggcgggggtctcggccgattcgtcgggcaatctcggcttggctccacccctcggccaacagggtgcgcaccaagtcttgggcccggttatcacgctcagtcactggtcgccccctcggggagtcctgcctgctcggcctgctctgatagagcagcccgctccgatccggtctgaggcgctttcaggggcccgggcaagacacctttgacacgcagccgcccgtccttgccgtcatcgccgcccccctgggccacagggagcgcccaggggggcacgttgctggtgtagatggcgtcgccgtggatggccagcagggtgcgggagttcatgcgtagtgctcctcccttggttgtggcgttttttccggtggtggggtcggcgatgggtgtgttgagggtgcgtacgcgggacagggcccagat

SEQ ID NO: 220 - DNA, 619 bp, Propionibacterium acnes
  source 1..619: mol_type = genomic DNA
ggcggtggctcgaccaggtcgccgacaaccccggcttcctcgacacccttatcgaggccgcccgcatcaccgatggatggcatcacgcgacgcctccgcacattcaggccccttaccggacccttcatcagtgaacggaggtacaacgacatgaccagcgacattgacattgaccggacccacaaacccgacgaccgcgccgaggctcctctttaccggtcctgggccaggagactcgtgcacgtctccgggatgccctggcgtatcgtcgccgccttggccggggtctcccccacctccatgcaccggcttctattcggccgcaacggtcgacccgtggaatggatcggcatcaatgatgctcgcgccctgatggatatcggcatcgatgatctcgcctcagcgtccaccgaccgtatcccggcccgcgaatcccgcgagctgttggtagccctgcacaccctcggctggaccaacgcgcacttgagccgctggctgaccagttccgacctcgacctggccaccacccccaaggccctctacgtcactcgactatccgccgcccgcatccaggccacctacgacatgctcatcagccagcccgtccgccgctgcggcc

SEQ ID NO: 221 - DNA, 8774 bp, Propionibacterium acnes
  source 1..8774: mol_type = genomic DNA
gaaggttccctagacccggccgatgtgcggagggatttcagtgttttatcgaggtgaccagccagccggtctgcgctgcgggttcaggtaccagggtcagatgcaccacggtgtggtcggctaggggcacggcgaccaggggcccgtcggcgctcgccccggtgagggtgggagttccggccacggtggtggcgggaatctggttgggtttcgcggccatcagggagcccatgagggtcggggcggcgatctggacgagggcgactttgcgggcggcgggatcgcgggtcaaccagccgcgggtgaaggtgagcgcagccgacgtgatatcggggctcagcggggctggtgtggcggcggggtgggccgttgaggagggccatacgcgcggtagcgctggcgacatcgagcgggtcggagtggggtcaggtgtggggcttagggtccgatgtggcgatggggctaccgccccggtggtgggagacgagactggttgggggtggtgttgagggcgtgggatcagggtgaaggcagccaaactggccgggatgaggatgacggccgcgccgacacttcggagcgaggtcatgtgacgatccttcggtagctcgacgggttgccgtagatcttttccacgttgatgccactatgtgggttgtcggcgctaaccatttggcctccaccgatgtagacggccacgtggtgggcagggcttccccagaggatgaggtcgccgactttgagctggtcacgggccacagcagtgccgactttctgctggtcggcggcggtgcggggaaggctaatgccgatacgccggtacagcgccgaggtcaggcctgagcagtcgtagccgccatcggctttgccgttaccaccccacacgtaggcgtaggagttgttgtcggcgatcgatttggcccatgccacggcttcggccaggttcttcgacacaccggtctcgttagcggccccggtggcacagttgtttgacaggtgccctgtagtagtggatcccactatttgtttggccatggtttcccatttggcgtaggcatcgggcagggctgagccttgcactgcctgagctgcctgcgtcagcggcatcttctgccagtcagcgatgtcgactaaaccgggaatgtggaatccagggccgccggccgatccggggccagcgtaggtgatggtgtggcctttcaagaacgcctcggtggcgtaggcatcattgttgacctgatccagagtcccgtaccagcccggcaggatgcgctgctgaaaggggccggcgtcaccgtcaccgttagccttcgctgaggtagggtcggccccaagatctgattcttgtttggcggtcatgatagcgatgaccgctgcctgggtaggcagtttgtcacgctggaccacagtgacgatggtggtcacgagctgcttctgcctggccgtgaggcctccggcacccacagtgcctccggtgacggtacccacgcaagcatccccgccgacactgccaccgccgccgccagagttgtcgtcgagggccccagagcctactgacagcagcggcacaatgatcacggtcgctggcaagaccgccaggcccgccagcatcagcactgctgcactcaccacggcgatcacgtgagatgctttcaacgctgcccacctctcgctggtttgagggggcgacgcctgctggtacgcacaggcttggttgatccagtccgccgttgattggcaggcctgggtttgatcggcttgctgggacccggtttgggctccggagtcttaggctccggcttcacatgcctaggcacttcggctgcggtgggaggagtcagcacgtggcgtaccggcttggtgaccttctgggcacccgaaacaaccggcttagacaccaccttggcacctttgaccaccggtgcggctgccttcgcgccggccttcttgactgcacgatgcgctttgatagccccggcctcggcccggccaaccctactagcagtagcatcgagggctctgtggcccgtcgttgccctcaccggtgcatccttgccctggcgggtctgcttcgcgatcgccgacatgccgcctcgcaatgccgaaacatgattgtgggcgtgggcgatcgccgacatgccggccgtcgcgatttttgactggccctgcggggcccctgccccagcacgaatctgccggtaagccgccgacgtgccacgagcacccgccgccattcgcgccaccttcgcagccctagtcactcccgtcgacacgccacccgtggctaccgcagcagcacccgagaccacagtcgaggccatccgccttcgacccgatccggtgagcttgcgaccaccactgcgcaccatccggcgagcaccccgcccagcccactggccgatcaccgagcccctttcggaacgcttgctgcgcatccaatcgttgatcttgtccctcagccccttctcgcccttgtgacgacgccacatggacatcaagaacccgataatccccacgagctcgagcatgttgacaaccatgaccttgatggcgacatcaccgtcagaggcgaaaaccgacttgatgatgagcatgaccacacccaacatcaccatcgacccgacaatgccgatcatcgagtacaagatcgaacacagatcccggatgagcggatctgtgcggccagggatagcccgcaacacgttgagcatcgacataaacgccgaccacaccaacttgcacacgtagaaccagcacatgcccgcgaacaccagcaggaccacagccaaacccgccaccgtcgacgagtaaaagaagaaacccaccaaccacgaaccatccgcaatatcgccggcgtaatccgacaacccctcatcacagtcaccaaggtcgtcgcgagcatccgagacgtcatcgtaagggccacccttgagcacctcgatgtacttgtcgtggcacttcgcatcaataatccggccatagttgagctgctgatgaaccggcgccacgaacgagtccacaatgatcgccgacagcttcggatccttcgagtctcccgtcgaggtcatgtcatcaggaatctcgacctcaccagcggtcgccgtcgcaggatcaaccgaactagtaatcatccgagacagcgccacaccgaactgctgggtgcgagccaacggagtagccaacgtcgtcgtatcgcctgcgaacttcgccaccggggccgccaagaaacccaacgccagcgccgcagcaatcgccgcacgcgcacccgtagcccacgccccagccgtacgtcccctcatcatcttgacgaccacgcccacaccggcgcacgtcgtcagcaacgtcaacaccgttccaccccagctgtccgctcccagcggggccaaaaccttgtcgtggatatcgttctgcaaccccaccagcgggccggtaatccacccgacccagctcatcgccacggtccagtccaacaaccggcacagcaacgcaatgaccatcaggtacgtgttccaacacataccaataatggaggcccacatagccttcaacggggccgtaacgccaccatcgtccatcgacatctggtactgaaacaagtgaataccgttggagtcagtcacattgaaaccgtcacccatccagcccagccccgggcccgacgccatagcaggcacactgctcagcgccaccaccaaaaccagcgtggtgacgatgatacggaaccaccgctccccggccccggggcggcgtggatgacggctcacgctgtctcccggtcgtgctcgggcgggttggagctggcggcttcgcggtggggagcgtaggcaggtctcagtagtcgaatttcaccgacgttgccgtgctgatcggcgtacaggccacaaccggggcctccggggttgagggcaatcttgaccaggtcagcgaactcttcaggggacgttttagggtccacgcccaggaactcgacacctttctgggcgaggttgatgttgtcgcacagcaacacgatgcgatgctgaatgaggttgcggacggtctcgttggggtaatcggcctcggggtcgtgggagccagtaatgagccaggcgttggctcggcgggattcgcgcacgtactcatcgatggcgtgggaggcttccggcgaggacgacatatggtggaactcgtcaacgatgaaagcggcgtcgcgggcccggtcgctgaagcacaccaggcgagccagacgggcaataagcgcgtagagggctcggccaaacaccttgtgcgggggcagctgccgaaacaaatgttctgacagcatctcctcggcgttaggaagagcgatgccacaagtgccaatgatgaggatgtcggcactcaggtcggcgggaggaaggtccgggtcaaagatggccgaagctagggaggccgagttctcgatgtcagcgaacacggcaatcctgtcagcgatcgcggtggcctcgggaaggtcgcactcctcggccaggtggcgggccaaacgcccacacgaggtgatctggtggtcacgcatgtaggccggtttgaggaccttggccagcgtggtcccggccacaccgatggtctccaagttaagcaaggtcagcaagaacgactgggcgacctgcccggccatctccgggggaaggatgcgcagcgggtccagcgacagcttggggtgggccgtgtcgacgatctggcgtctaaccccgtcgatagagttgacaaaggttacccactcccgctcatcggagttgtcggtggcaataatgcgcccgccccgggccgcgatggctgcgcacagccgcttctcggccatcgtcttgcccgcgcccatcttgccgatgaacgccaccgtgttgcctttctgatcctgagtgtcggcatgcaaatcgaggtaggccagcgactgcaacggggagcctgtgaccacagccaacgggatgccggtggtacggcccaaccggtactcaaccaccgggatagatgcggcgaacgcggaggcgtgagtcagctgacggtaggcgttaagcgaggaggagaaccggccaccgggccgggcagcccacagcaagtcctcctgacggcccacgggacgcacccacgtgaagtcaccgaacaccggatcattgacgaacgctcctgccagctcctcggtggtctcaaagtcaggagacgagacagtgacggtgataagagcctggatctcgacctcacgctcatcggcggccagctcggcgttgtagtcgacgagcacctgagcggaatgctcgatagacatgagggtcgaagcctgggtcatctcaccgccctcaacattgtcgagctgatcgacggtttggcggatggcccgctgatttttctgcatcgcagcgtgacgggtccgggccactccccggatcgccacgtcgaccggcacgccagtgtcgtcgatacggcccaagaactcgtaggcaggccacgtcatcgtgcggggcaccttacccagcacgatatgggactggtagacggtctcgccggtgtcggcaccgattttgaggacgcgacgattccacgcctgagccgtccgggacatgtgggagactcgcttgtcatcctcgctggccagcaggtcggaggtcgcggcctcatcgatgaccaactcccccagcgcggcacgtccaacctcatccatgagggcgattccctcgccaggggcatcatcacgcaaccgggtcgggtggcctgacaggtgctgccgaagccagatctgttcatcaacggtgaccgggcggggttggaacgctgccggcagtttcgcaccgaattccttagcctgacggagggcccactcccgtgcgacacggccaggagcggtggtcatgagtccggcgacttcggtgattttgttgagggcggcggtccaggcggtgtgggtgcgtattttctggtcttggttgagtttgatcgataggaaccacacgcgccggcctagggatgcggtttcaggctggtcgagggtggcgtcgatttcgtcggcccacacggggtgttcgctcaggtcgaggccggcggccatggcgtcgacgatttctgtggggtcggtccaggtgagggccccgttgaggcagaactcgtggcgggcgaggtggcggaataggtcgcggtgagctgcggcgacggtgagggaggcgttctcggtgacgggtcgctggaggggagtaagtcgccaagtggcccagatgtcgccggtggaggtccagacgaggttgtcgaagaggaaccgttcggggatggacatcatgactccttttcggcggcggcgaggaaggcttccaggccgctgcggcgtacagcgttcccagtagggtgcaggggttttctgggggtgggttcagatttcgaatgtgggaagagtttgtggatggtatcggtgtcctcggcgagggcttggtcgagcaggcaggtggccggggtgtcggtcatctcgtccagctcgtcgatcatctcgtcgaggaggttgggggtggtggatgcggcccacacaggtgggatagccggtgcgggtcgaggcggtgtggggaggcggagtttggtttggccccagaggggtgtgtgggtcatgccggcgggagtggtggcggcgtgagtggtcacacgccaccagcccgacagccatgccagaggtgaccaggtccagtcgatgcgaccaacaacgaactgggcgagccatccggcagccagcgcgaaaatgaaaccgcggatggtcatgcccccgtcgataattttgaagcccatcatcgcggcaggaactacaccgccgacagcgagcacctgatagatcgtgtagggcccgccaggaatccttcgacctgaggaatccttgccgataatgcggggctgctggcgggcctcggtgtgccactgaatatccacgatcagctcttgcccaatccttgcatcatctgtccgaagaattggatcgcgttaccttcgataagccagtgcgccataccacacacaaacagcatggagacgatcttggccaggctcataccgtgtttgaagatgttgaacgcggcaatgcccacgactacgaccatggcgacggctcgcaccgcggactgaccttcacctgccttgatcgtcgtccattcgaagaggttctgcgattccagtggcagcaggaggaattgatcgagcatgagaggttttcctttcaggaagccgaccgggatggtcccggtactgacgggctggacggcacgggtgtgccggccaggggcagaaggcgtgacggctggtcgagggcggcaacctcccagcgtcctgcacgactgacaagagtcaggccgtactggctagtccgggtagtggattcgtcaccggtgggctggcatgtcacggtcaccgtgacggtaatcttctgccgatctgagggggtggggacctcgtcaggccccaccacatgagtggttttcaccgatacacacggggctgggtcaaccgcggtgaaagcggtccccgggctactccatctcgacaggtcagtattcccggtcagcatggcggccaagaaacccgaagaggtctgggcagccgggtcagcaggacgaatctccgaggagtccacgtcgggggctgaggccggtgcaggcatggggatctgcccaggtagacgcaaggcgatggccttgccgccggcatcgacgtggaccggaaccgaccaggcctgtccgctcccggattggccgcccatggtgaccacggtgacctgccacaggctcggatcagacggggagacggtagcgtcataggcggtgacggtggtgggcgctggaccaggtttgcggggcatgcgcgcatcggtgatcttggccgccaccaggtgttccagattgtccaagtgcccggagtcagaggtcagcagaagagtagtcacctcgaccgcggtggctgaggcgatctgagctgtgcggcggtcgtgatgggtggtgtcagtgctgacagctgtggtgggagcggatgccggggccgccgaacggaccagggcaacggggccgcatgcgactccgcacagcacgagggcaaggaagcctttggtggccatcgatccggtgtggggccagggacccacgttttcctgtgcctgttttttcttggccgaccaacggcgggacttagggttagcggatgcaccttctggggtgcatgctcgtctcaatcgcatcggtcacctccttcactggatgaagggaccaaggaggtgaccgatgtgcggtcgaacccgaaaaagttcaaacttttttctgggtctgcctcaagtacgacagaaggcctgcatcatcacggcgttgtggtagcagatcttgcgtcagcgcaaatgcatgggcctcgtaggagtagctcttaggtaggtcccggtggttgcggccagggcgagggtgtcgggtatgtgtagcgctagtcccgggttcgtggtgtgagggcttttgggtgctgacatgcactacccattgctagacgctgtgctgtggcatggctggacgtctagcagacgggttgacatcacctttaggctggcagcgcccgaggccgcaggccagaggaagcggacagcctaacgattgacgtccccctctcctttccccaacctcctggagtcgatgacccggagatagatcgatgtctatgcatcggtgcatcgatatacctatgtatctgtctgtggtttttagaggccactcccgtcgccccgggccgctcagcgataccgcaaggctgtgtgggatcag

SEQ ID NO: 222 - DNA, 8231 bp, Propionibacterium acnes
  source 1..8231: mol_type = genomic DNA
gggatgaggatgacggccgcgccgacacttcggagcgaggtcatgtgacgatccttcggtagctcgacgggttgccgtagatcttttccacgttgatgccgctgtgggggttgtcggcgctaaccatttggcctccaccgatgtagacggccacgtggtgggcagggcttccccagaggatgaggtcgccgactttgagctggtcacgggccaccgcggtgccgacgtgctgttgttcggcggcggtgcggggaaggctaatgccgatacgccggtacagcgccgaggtcaggcctgagcagtcgtagccgccatcggctttgccgttgccaccccacacgtaggcgtaggagttgttgtcggcgatcgatttggcccatgccacggcttcggccaggttcttcgacacaccggtctcgttagcggccccggtggcacagttgtttgacaggtgccctgtagtagtggatcccactatttgtttggccatggtttcccatttggcgtaggcatcgggcagggctgagccttgcactgcctgagctgcctgcgtcagcggcatcttctgccagtcagcgatgtcgactaaaccgggaatgtggaatccagggccgccggccgatccggggccagcgtaggtgatggtgtggcctttcaagaacgcctcggtggcgtaggcatcattgttgacctgatccagagtcccgtaccagcccggcaggatgcgctgctgaaaggggccggcgtcaccgtcaccgttagccttcgctgaggtagggtcggccccaagatctgattcttgtttggcggtcatgatagcgatgaccgctgcctgggtaggcagtttgtcacgctggaccacagtgacgatggtggtcacgagctgcttctgcctggccgtgaggcctccggcacccacagtgcctccggtgacggtacccacgcaagcatccccgccgacactgccaccgccgccgccagagttgtcgtcgagggccccagagcctactgacagcagcggcacaatgatcacggtcgcgggcaagaccgccaggcccgccagcatcagcactgctgcactcaccacggcgatcacgtgagatgctttcaacgctgcccacctctcgctggtttgagggggcgacgcctgctggtacgcacaggcttggttgatccagtccgccgttgattggcaggcctgggtttgatcggcttgctgggacccggtttgggctccggagtcttaggctccggcttcacatgcctaggcacttcggctgcggtgggaggagtcagcacgtggcgtaccggcttggtgaccttctgggcacccgaaacaaccggcttagacaccaccttggcacctttgaccaccggtgcggctgccttcgcgccggccttcttgactgcacgatgcgctttgatagccccggcctcggcccggccaaccctactagcagtagcatcgagggctctgtggcccgtcgttgccctcaccggtgcatccttgccctggcgggtctgcttagcgatcgccgacatgccgcctcgcaatgccgaaacatgattgtgggcgtgggcgatcgccgacataccggccgtcgcgatttttgactggccctgcggggcccctgccccagcacgaatctgccggtaagccgccgacgtgccacgagcacccgccgccattcgcgccaccttcgcagccctagtcactcccgtcgacacgccacccgtggctaccgcagcagcacccgagaccacagtcgaggccatccgccttcgacccaatccggtgagcttgcgaccaccgctgcgcaccatccggcgagcaccccgcccagcccactggccgatcaccgagcccctttcggaacgcttgctgcgcatccaatcgttgatcttgtccctcagccccttctcgcccttgtgacgacgccacatggacatcaagaacccgataatccccacgagctcgagcatgttgacaaccatgaccttgatggcgacatcaccgtcagaggcgaaaaccgacttgatgatgagcatgaccacacccaacatcaccatcgacccgacaatgccgatcatcgagtacaagatcgaacacagatcccggatgagcggatctgtgcggccagggatagcccgcaacacgttgagcatcgacatgaacgccgaccacaccaacttgcacacgtagaaccagcacatgcccgcgaacaccagcaggaccacagccaaacccgccaccgtcgacgagtaaaagaagaaccccaccaaccacgaaccatccgcaatatcgccggcgtaatccgacaacccctcatcacagtcaccaaggtcgtcgcgagcatccgagacgtcatcgtaagggccacccttgagcacctcgatgtacttgtcgtggcacttcgcatcaataatccggccatagttgagctgctgatgaaccggcgccacgaacgagtccacaatgatcgccgacagcttcggatccttcgagtctcccgtcgaggtcatgtcatcaggaatctcgacctcaccagcggtcgccgtcgcaggatcaaccgaactggtaatcatccgagacagcgccacaccgaactgctgggtgcgagccagcggagtagccaacgtcgtcgtatcgcctgcgaacttcgccaccggggccgccaagaaacccaacgccagcgccgcagcaatcgccgcacgcgcccccgtagcccacgcccctgccgtacgtcccctcatcatcttgacgaccacgcccacaccggcgcacgtcgtcagcaacgtcaacaccgttccaccccagctgtccgctcccagcggggccaaaaccttgtcgtggatgtcgttctgtaaccccaccagcggtccggtaatccacccgacccagctcatcgccacggtccagtccaacaaccggcacaacagggcaatgaccatcaggtacgtgttccaacacatgccaataatggaggcccacatagccttcagcggggccgtaacgccaccatcgtccatcgacatctggtactgaaacaagtgaataccgttggagtcagtcacattgaaaccgtcacccatccagcccagccccgggcccgatgccatggcaggcacactgctcagcgccaccaccaaaaccagcgtggtgacgatgatacggaaccgccgctccccggccccggggcggcgtggatgacggctcacgctgtctcctggtcgtgctcgggcgggttggagctggcggcttcgcggtggggagcgtaggcaggtctcagtagtcgaatttcaccgacgttgccgtgttggtcggcgtacaggccacaaccggggcctccggggttgagggcaatcttgaccaggtcagcgaactcttcaggggacgtcttagggtccacgcccaggaactcgacacctttctgggcgaggttgatgttgtcgcacagcaacacgatgcgatgctgaatgaggttgcggacggtctcgttggggtaatcggcctcggggtcgtgggagccggtgataagccaggcattggctcggcgggattcgcgcacgtactcgtcaatggcgtgggaggcttccggcgaggacgacatgtgatgaaactcgtcaacaatgaaagcggcgtcgcgggcccggtcgctgaagcacaccaggcgagccagacgggcaataagcgcgtagagggctcgaccaaacaccttgtgcgggggcagctgccgaaacaaatgttctgacagcatctcctcggcgttaggaagagcgatgccacaagtgccaatgatgaggatgtcggcactcaggtcggcgggaggaaggtccgggtcaaagatggccgaagctagggaggccgagttctcgatgtcagcgaacacggcaatcctgtcagcgatcgcggtggcctcgggaaggtcgcactcctcggccaggtggcgggccaaacgcccacacgaggtgatctggtggtcacgcatgtaggccggtttgaggaccttggccagcgtggtcccggccacaccgatggtctccaagttaagcaaggtcagcaagaacgactgggcgacctgcccggccatctccgggggaaggatgcgcagcgggtccagcgacagcttggggtgggccgtgtcgacgatctggcgtctaaccccgtcgatagagttgacaaaggttacccactcccgctcatcggagttgtcggtggcaataatgcgcccgccccgggccgcgatggctgcgcacagccgcttctcggccatcgtcttgcccgcgcccatcttgccgatgaacgccaccgtgttgcctttctgatcctgagtgtcggcatgcaaatcgaggtaggccagcgactgcaacggggagcctgtgaccacagccaacgggatgccggtggtacggcccaaccggtactcaaccaccgggatagatgcggcgaacgcggaggcgtgagtcagctgacggtaggcgttaagcgaggaggagaaccggccaccgggccgggcagcccacagcaagtcctcctgacggcccacgggacgcacccacgtgaagtcaccgaacaccggatcattgacgaacgctcctgccagctcctcggtggtctcaaagtcaggagacgagacagtgacggtgataagagcctggatctcgacctcacgctcatcggcggccagctcggcgttgtagtcgacgagcacctgagcggaatgctcgatagacatgagggtcgaagcctgggtcatctcaccgccctcaacattgtcgagctgatcgaccgtttgacggatagcccgctgatttttctgcatcgcagcgtgacgggtccgggccactccccggatcgccacgtcgaccggcacgccagtgtcgtcgatacggcccaaaaactcgtaggcaggccacgtcatcgtgcggggcaccttacccagcacgatatgggactggtagacggtctcgccggtgtcggcaccgattttgaggacgcgacgattccacgcctgagccgtccgggacatgtgggagactcgcttgtcatcctcgctggccagcaggtcggaggtcgcggcctcatcgatgaccaactcccccagcgcggcacgtccaacctcatccatgagggcgattccctcgccaggggcatcatcacgcaaccgggtcgggtggcctgacaggtgctgccgaagccagatctgttcatcaacggtgaccgggcggggttggaacgctgccggcagtttcgcaccgaattccttagcctgacggagggcccactcccgtgcgacacggccaggagcggtggtcatgagtccggcggcttcggtgattttgttgagggcggcggtccaggcggtgtgggtgcgtattttctggtcttggttgagtttgatcgataggaaccacacgcgccggcctagggattcggtttcaggctggtcgagggtggcgtcgatttcgtcggcccacacggggtgttcgctcaggtcaaggccggcggccatggcgtcgacgatttctgtggggtcggtccaggtgagggctccgttgaggcagaactcgtggcgggcgaggtggcggaataggtcgcggtgagctgcggcgacggtgagggaggcgttctcggtgacgggtcgctggaggggagtgagtcgccaggtggcccagatgtcgccggtggaggtccagacgaggttgtcgaagaggaaccgttcggggatggacatcatgactccttttcggcggcggcgaggaaggcttccaggccgctgcggcgtacagcgttcccggtagggtgcaggggttttctgggggtgggttcagatttcgaatgtgggaagagtttgtggatggtatcggtgtcctcggcgagggcttggtcgagcaggcaggtggccggggtgtcggtagtctcgtccagctcgtcgatcatctcgtcgaggaggttgggggtggtggatgcggcccacacaggtgggatagccggtgcgggtcgaggcggtgtggggaggcggagtttggtttggccccagaggggtgtgtgggtcatgccggcgggagtggtggcggcgtgagtggtcacacgccaccagcccgacagccatgccagaggtgaccaggtccagtcgatgcgaccaacaacgaactgggcgagccatccggcagccagcgcgaaaatgaaaccgcggatggtcatgcccccgtcgataattttgaagcccatcatcgcggcaggaactacgccgccgacagcgagcacctgatagatcgtgtagggcccgccaggaatccttcgacctgaggaatccttaccgataatgcggggctgctggcgggcctcggtgtgccactgaatatccacgatcagctcttgcccaatccttgcatcatctgtccgaagaattggatcgcgttaccttcgataagccagtgcgccataccacacacaaacagcatggagacgatcttggccaggctcataccgtgtttgaagatgttgaacgcggcaatgcccacgactacgaccatggcgacggctcgcaccgcggactgaccttcacctgccttgatcgtcgtccattcgaagaggttctgcgattccagtggcagcaggaggaattgatcgagcatgagaggttttcctttcaggaagccgaccgggatggtcccggtactgacgggctggacggcacgggtgtgccggccaggggcagaaggcgtgacggctggtcgagggaggcaacctcccagcggcctgcacggctgacaagagtcaggccgtactggctggtccgggtagtggattcgtcgccggtgggctggcatgtcacggtcaccgtgacggtaatcttctgccggtctgagggggtggggacctcgtcaggtcccaccacatgagtggttttcactgatacgcatggggctgggtcaaccgcggtgaaagcggtccctgggctgctccatctcgacaggtcggtattcccggtcagcatggcggttaggaagcctgaagaggcttgggcggccgggtcggcggtgcgaagctccgaggtgtctagggtgggggctgaggccggtgcaggcatggggatctgtccaggtagacgcaaggcgatggccttgccgttggaatcgacgtggaccgggactgaccaggcctgtccgctcccggattggccgcccatggtgaccacggtgacctgccacaggctcggatcagacggggagacggtagcgtcataggcggtgacggtggtgggcgctggaccaggtttgcggggcatgcgcgcatcggtgatcttggccgccaccaggtgttccagattgtccaagtgcccggagtcagaggtcagcagaagagtagtcacctcgaccgcggtggctgaggcgatctgagctgtgcggcggtcgtgatgggtggtgtcagtgctgacagctgtggtgggagcggatgccggggccgccgaacggaccagggcaacggggccgcatgcgactccgcacagcacgagggcaaggaagcctttggtggccatcgatccggtgtggggccagggacccacgttttcctgtgcctgttttttcttggccgaccaacggcgggacttagggttagcggatgcaccttctggggtgcatgctcgtctcaatcgcatcggtcacctccttcactggatgaagggaccaaggaggtgaccgatgtgcggtcgaacccgaaaaagttcaaacttttttctgggtctgcctcaagtacgacagaaggcctgcatcatcacggcgttgtggtagcagatcttgcgtcagcgcaaatgtatgggcctcgtaggagtagctcttaggtgggtcccggtggttgcggccagggcgagggtgtcgggtatgtgtagcgctagtcccgggttcgtggtgtgagggcttttgggtgctgacatgcactacccattgctagacgctgtgctgtggcatggctggacgtctagcagacgggttgacatcacctttaggctggcagcgcccgaggccgcaggccagaggaagcggacagcctaacgattgacgtccccctctcctttccccaacctcctggagtcgatgacccggagatagatcgatgtctatgcatctgtgcatcgatatacctatgtatctgtctgtggtttttagaggccactcccgtcgccccgggccgctcagcgataccgcaaggctgtgtgggatcagct

SEQ ID NO: 223 - DNA, 2020 bp, Propionibacterium acnes
  source 1..2020: mol_type = genomic DNA
ttgggtccccagatcgacgtggatacggcaggcggctgccatgcgcagcagggagccgatccagccgaaaacggggcattctccgggcatcccagagaccttgatcgttgaccaccagtttttcgcgttgccgtagaactggcggtactcgtcgatgaggaccagcacgcgggtgaagtcggtctcgcgggccccttcttcttcgatgcggcggtagcggtcctccatgagagaccacagccagtggatgagggcgacctggtcggggacggtagtggcgaccatctcgatgttgggccactcccgcaggcccaggtactcgatgcgtttagggtcgatgacgaagacgcgccagttgcggcgggcaccctcgacggcgtcgccgatcatggacaccgtttttccggtacgggtgcggccggccttgagctggtgggccatgacaccggagatgtcccagaaacaggtgttgccgtcctcgtcgacggcctgggggattttctcccagtctggggagtctgggcccggaagggccacgggtcggggcaccatcgagggcagggggtggcggcgggtgacggtgatggtgtcgtgttccaggtcgaagtcgctgcgccactggccgagcatcatcgccgaggtcaccgcggccaggcgcaattggatgttcgggctggacaaatgggcgccacgttggtggtgaatggtgaagccgtccaggttcccccgatcggttttccaggaatcgacggtgaccgccgacccatagatctgagtggctacttctttagcccgttccttgtctcggtccagatcggttttgtcagggtcaggggtcggggcgcggtattgcaggacgaaccggccggccgggatcgttgcggatgtcaccgtgaactctgccggcgaccaggcagccgcggccgcctgggtgagggccattggcatggtctcgacggcagcctcctcgggggggatggtgagggtcaggcgtcgcggatgcgtcttcttgcgattccatgtgactttctgcctcaccggcaccttcgccgccgactgaatggctaggcgagctgattcggcagtttcggtacgccggccagcgcgtagcgcccgtcgtgcgtgaaggctgcccaccacagcacagcccatacacggcagccaccagcgcggatcagcggctgctgcatagcccccggtagctagtaccgcacctgaccagccggccgcgatacttttccacgccggtttcgcgccaccaggaccagcgttatggacggtctgcttcgaggctgcggagggacgagacagcggagtgctggtcatgctgcggcctccttgtggcaggtcatttcacaggcatgccggccagcgatgatgccgtggcgcaccgccccggtagccgcatagaccgcgcacaactcaaacacggggcacccatcgcaggccgccggatccatgctctctttgtcccacgatggtgggtcatcggtgcacggcacggccaggccatcctgttgagcggcgctgatagcggtgaataggcgcagctgggcgcgaacttggtctggggtcaggttgacggtgcgggctacacgcatggggttccttcctcttcaccagtgaaggttccctagacccggccgatgtgcggagggatttcagtgttttatcgaggtgaccagccagccggtctgcgctgcgggttcaggtaccagggtcagatgcagcatggtgtggtcggctaggggcacggcgaccaggggcccgtcggcgctcgccccggtgagggtgggagttccggccacggtggtggcaggaatctggttgggtttcgcggccatcagggagcccatgagggtcggtgcggcgatctggacgagggcgactttgcgggcggcgggatcgcgggtcaaccagccgcgggtgaaagcgagcgccgccgacgtgatatcggggctcagcggggctggagtggcggctgggtgggccgttgaggagggccacacgcgcggtagcg

SEQ ID NO: 224 - DNA, 8643 bp, Propionibacterium acnes
  source 1..8643: mol_type = genomic DNA
caacgctggattcggcgatggtcacccattctccgtcgatattgatgagcaccccagcggccagctccgtggcagcaaccgggtgaggtgggttgtagaagcggtcgatgtcgcaggcagggtcgtcgggttcctcgactaccggaggtggggtcgatctggctgtctcggtgtcgtcggccaggtcggctcccaggatgcgctcccattcggggctggttttcttgcccgctgaggccatcgtctcgtcgatctgttcgtcagtgggccacacaaatttctttttggtccaggtcgtggtgtcgggtcgcagctgatccagcagttccaggtcttgcggggagtgggccttgcgggggtcgggggtgtagaagaattggacttccttgggggctgattcgccggataggtaggtgccgcggccgcgtttgccgaacgggatgcccacgccgacgtgttcggagccgaacatcatgcgggctccgtcagcggacaggggtccggtggcggcacgcccggagaagttgtctcggatttcgccgcccaggaactcggcgtcggggcgttgggtccccagatcgacgtggatacggcaggcggctgccatgcgcagcagggagccgatccagccgaaaacggggcattctccgggcatcccagagaccttgatcgttgaccaccagtttttcgcgttgccgtagaactggcggtactcgtcgatgaggaccagcacgcgggtgaagtcggtctcgcgggccccttcttcttcgatgcggcggtagcggtcctccatgagagaccacagccagtggatgagggcgacctggtcggggacggtagtggcgaccatctcgatgttgggccactcccgcaggcccaggtactcgatgcgtttagggtcgatgacgaagacgcgccagttgcggcgggcaccctcgacggcgtcgccgatcatggacaccgtttttccggtacgggtgcggccggccttgagctggtgggccatgacaccggagatgtcccagaaacaggtgttgccgtcctcgtcgacggcctgggggattttctcccagtctggggagtctgggcccggaagggccacgggtcggggcaccatcgagggcagggggtggcggcgggtgacggtgatggtgtcgtgttccaggtcgaagtcgctgcgccactggccgagcatcatcgccgaggtcaccgcggccaggcgcaattggatgttcgggctggacaaatgggcgccacgttggtggtgaatggtgaagccgtccaggttcccccgatcggttttccaggaatcgacggtgaccgccgacccatagatctgagtggctacttctttagcccgttccttgtctcggtccagatcggttttgtcagggtcaggggtcggggcgcggtattgcaggacgaaccggccggccgggatcgttgcggatgtcaccgtgaactctgccggcgaccaggcagccgcggccgcctgggtgagggccattggcatggtctcgacggcagcctcctcgggggggatggtgagggtcaggcgtcgcggatgcgtcttcttgcgattccatgtgactttctgcctcaccggcaccttcgccgccgactgaatggctaggcgagctgattcggcagtttcggtacgccggccagcgcgtagcgcccgtcgtgcgtgaaggctgcccaccacagcacagcccatacacggcagccacgagcgcggatcagcggctgctgcatagcccccggtagctagtaccgcacctgaccagccggccgcgatacttttccacgccggtttcgcgccaccaggaccagcgttatggacggtctgcttcgaggctgcggagggacgagacagcggagtgctggtcatgccgcggcctccttgtggcaggtcatttcacaggcatgccggccagcgatgatgccgtggcgcaccgccccggtagccgcatagaccgcgcacaactcaaacacggggcacccatcgcaggccgccgggttcatgctttctttgtcccacgatggtgggtcatcggtgcacggcacggccaggccatcctgttgagcggcgctgatagcggtgaataggcgcagctgggcgcgaacttggtctggggtcaggttgacggtgcgggctacacgcatggggttccttcctcttcaccagtgaaggttccctagacccggccgatgtgcggagggatttcagtgttttatcgaggtgaccagccatccggtctgcgctgcgggttcaggtaccagggtcagatgcagcatggtgtggtcggctaggggcacggcgaccaggggcccgtcggcgctcgccccggtgagggtggggggtccggccacggtggtggcgggaatctggttgggtttcgcggccatcagggagcccatgagggtcggggcggcgatctggacgagggcgactttgcgggcggcgggatcgcgggtcaaccagccgcgggtgaaggtgagcgcagccgacgtgatatcggggctcagcggggctggtgtggcggcggggtgggccgttgaggagggccatacgcgcggtagcgctggcgacatcgagcgggtcggagtggggtcaggtgtggggcttagggtccgatgtggcgatggggctaccgccccggtggtgggagacgagactggttgggggtggtgttgagggcgtgggatcagggtgaaggcagccaaactggccgggatgaggatgacggccgcgccgacacttcggagcgaggtcatgtgacgatccttcggtagctcgacgggttgccgtagatcttttccacgttgatgccactatgtgggttgtcggcgctaaccatttggcctccaccgatgtagacggccacgtggtgggcagggcttccccagaggatgaggtcgccgactttgagctggtcacgggccacagcagtgccgactttctgctggtcggcggcggtgcggggaaggctaatgccgatacgccggtacagcgccgaggtcaggcctgagcagtcgtagccgccatcggctttgccgttgccaccccacacgtaggcgtaggagttgttgtcggcgatcgatttggcccatgccacggcttcggccaggttcttcgacacaccggtctcgttagcggccccggtggcacagttgtttgacaggtgccctgtagtagtggatcccactatttgtttggccatggtttcccatttggcgtaggcatcgggcagggctgagccttgcactgcctgagctgcctgcgtcagcggcatcttctgccagtcagcgatgtcgactaaaccgggaatgtggaatccagggccgccggccgatccggggccagcgtaggtgatggtgtggcctttcaagaacgcctcggtggcgtaggcatcattgttgacctgatccagagtcccgtaccagcccggcaggatgcgctgctgaaaggggccggcgtcaccgtcaccgttagccttcgctgaggtagggtcggccccaagatctgattcttgtttggcggtcataatagcgatgaccgctgcctgggtaggcagtttgtcacgctggaccacagtgacgatggtggtcacgagctgcttctgcctggccgtgaggcctccggcacccacagtgcctccggtgacggtacccacgcaagcatccccgccgacactgccaccgccgccgccagagttgtcgtcgagggccccagagcctactgacagcagcggcacaatgatcacggtcgcgggcaagaccgccaggcccgccagcatcagcactgctgcactcaccacggcgatcacgtgagatgctttcaacgctgcccacctttcgctggtttgagggggcgacgcctgctggtacgcacaggcttggttggtccagtccgccgttggttggcaggcctgggtttgatcggcttgctgggacccggtttgggctccggagtcttaggctccggcttcacatgcctaggcacttcggctgcggtgggaggagtcagcacgtggcgtaccggcttggtgaccttctgggcacccgaaacaaccggcttagacaccaccttggcacctttgaccaccggtgcggctgccttcgcgccggccttcttgactgcacgatgcgctttgatagccccggcctcggcccggccaaccctgctagcagtagcatcgagggctctgtggcccgtcgttgccctcaccggtgcatccttgccctgacgggcctgcttcgcgatcatcgacataccgccccgcaacgccgaaacacggttgtgagcgtgggcgacggccgacataccagctgtcgtaattttcgactggccctgcggagctcctcccccggtacggatctgacgatatgacgccgaagcacgccgcgccgccgaggccattcgcgccatcttcgcagcccgggtcactcccaccgacgcgccaccggtgactaccgcagccgcagccgaaaccatccgccttcgacccaatccagtgagcttgcgaccaccgctgcgcaccatccggcgagcaccccgcccagcccactggccaatcgccgacgccccttcagagcgcttactacgcatccagtcgttgatcttggccctcagcccctcctcacccttgtgactacgccacagagacaccaagaatccgatgattcccacgatttccaacatgttgacgaccatgaccttgatgacaacgttgccatcagaggcgaagaccgacttgatgacgagcatgaccacgcccagcatcaccatcgacccaacaatgccgatcatcgagtacaagatcgaacacagatcccggataagcgggtctgtgcgaccaggaatagcccgcagcacgttgagcatcgacatgaacgccgaccacaccaacttgcacacgtagaaccagcacatgcccgcgaacaccagcaggattgctgccaaacccgtcaccgttgacgagtaaaagaagaaccccaccaaccaggaaccgtccgcaatatcgccggcgtaatccgataatccctcgtcacaatcaccgaggtcgtcgcgtgcatccgagatatcgtcgtaaggaccacctttgagcacctcgatgtacttgtcgtgacatttggaatcaataatgcggccgtagttgagttgctgatgaaccggcgccacgaacgagtccacaatgatcgccgacagcttcggatccttcgagtctcccgtcgaggtcatgtcatcaggaatctcgacctcaccagcggtcgccgtcgcaggatcaaccgaactggtaatcatatgagacagcgccacaccgaactgctgggtgcgagccagcggagtagccaacgtcgtcgtatcgcctgcgaacttcgccaccggggccgccaagaaacccaacgccagcgccgcagcaatcgccgcacgcgcacccgtagcccacgcccctgccgtacgtcccctcatcatcttgacgaccacgcccacaccggcgcacgtcgtcagcaacgtcaacaccgttccaccccagctgtccgctcccagcggggccaaaaccttgtcgtggatgtcgttctgtaaccccaccagcggtccggtaatccacccgacccagctcatcgccacggtccagtccaacaaccggcacaacagggcaatgaccatcaggtacgtgttccaacacatgccaataatggaggcccacatagccttcagcggggccgtaacgccaccatcgtccatcgacatctggtactgaaacaagtgaataccgttggagtcagtcacattgaaaccgtcacccatccagcccagccccgggcccgatgccatggcaggcacactgctcagcgccaccaccagaaccagcgtggtgacgatgatacggaaccaccgctccccggttccggggcggcgtggatgacggctcacgctgtctcctggtcgtgctcgggcgggttggagctggcggcttcgcggtggggagcgtaggcaggtctcagtagtcgaatttcaccgacgttgccgtgttggtcggcgtacaggccacaaccggggcctccggggttgagggcaatcttgaccaggtcagcgaactcttcaggggacgttttagggtccacgcccaggaactcgacacctttctgggcgaggttgatgttgtcgcacagcaacacgatgcgatgctgaatgaggttgcggacggtctcgttggggtaatcggcctcggggtcgtgggagccagtaatgagccaggcgttggctcggcgggactcacgcacgtactcgtcgatggcgtgggaggcttccggcgaggacgacatgtgatgaaactcgtcaacaatgaaagcggcgtcgcgggcccggtcgctgaagcacaccaggcgagccagacgggcaatgagcgcgtagagggctcggccaaacaccttgtgcgggggcagctgccgaaacagatgttctgacagcatctcctcggcgttaggaagagcgatgccacaagtgccaatgatgaggatgtcggcactcaggtcggcgggaggaaggtccgggtcaaagatggccgaagctagggaggccgagttctcgatgtcagcgaacacggcaatccggtcggcgatcgcggtggcctcgggaaggtcgcattcctcggccaggtggcgggccagacgcccacacgaggtgatctggtggtcacgcatgtaggccggtttgaggaccttggccagcgtggtcccggccacaccgatggtctccaagttaagcaaggtcagcaagaacgactgggcgacctgcccggccatctccgggggaaggatgcgcagcgggtccagcgacagcttggggtgggccgtgtcgacgatctggcgtctaaccccgtcgatagagttgacaaaggttacccactcccgctcatcggagttgtcggtggcaataatgcgcccgccccgggccgcgatggctgcgcacagccgcttctcggccatcgtcttgcccgcgcccatcttgccgatgaacgccaccgtgttgcctttctgatcctgagtgtcggcatgcaaatcgaggtaggccagcgactgcaacggggagcctgtgaccacagccaacgggatgccggtggtacggcccaaccggtactcaaccaccgggatagatgcggcgaacgcggaggcgtgagtcagctgacggtaggcgttaagcgaggaggagaaccggccaccgggccgggcagcccacagcaagtcctcctgacggcccacgggacgcacccacgtgaagtcaccgaacaccggatcattgacgaacgctcctgccagctcctcggtggtctcaaagtcaggagacgagacagtgacggtgataagagcctggatctcgacctcacgctcatcggcggccagctcggcgttgtagtcgacgagcacctgagcggaatgctcgatagacatgagggtcgaagcctgggtcatctcaccgccctcgacgttgtcgagctggtcgacggtttggcggatggcccgctgatttttctgcatcgcagcgtgacgggtccgggccactccccggatcgccacgtcgaccggcacgccagtgtcgtcgatacggcccaaaaactcgtaggcaggccacgtcatcgtgcggggcaccttacccagcacgatatgggactggtagacggtctcgccggtgtcggcaccgattttgaggacgcgacgattccacgcctgagccgtccgggacatgtgggagactcgcttgtcatcctcgctggccagcaggtcggaggtcgcggcctcatcgatgaccaactcccccagcgcggcacgtccaacctcatccatgagggcgattccctcgccaggggcatcatcacgcaaccgggtcgggtggcctgacaggtgctgccgaagccagatctgttcatcaacggtgaccgggcggggttggaacgctgccggcagtttcgcaccgaattccttagcctgacggagggcccactcccgtgcgacacggccaggagcggtggtcatgagtccggcggcttcggtgattttgttgagggcggcggtccaggcggtgtgggtgcgtattttctggtcttggttgagtttgatcgataggaaccacacgcgccggcctagggattcggtttcaggctggtcgagggtggcgtcgatttcgtcggcccacacggggtgttcgctcaggtcaaggccggcggccatggcgtcgacgatttctgtggggtcggtccaggtgagggctccgttgaggcagaactcgtggcgggcgaggtggcggaataggtcgcggtgagctgcggcgacggtgagggaggcgttctcggtgacgggtcgctggaggggagtgagtcgccaggtggcccagatgtcgccggtggaggtccagacgaggttgtcgaagaggaaccgttcggggatggacatcatgactccttttcggcggcggcgaggaaggcttccaggccgctgcggcgtacagcgttcccggtagggtgcaggggttttctgggggtgggttcaggtttcgggtctgggaggggtttgggctcgtaggtggtgtcgatgtcttcggcgaggacgtggtcgagcaggcaggtggccggggtgtcg

SEQ ID NO: 225 - DNA, 8232 bp, Propionibacterium acnes
  source 1..8232: mol_type = genomic DNA
gggatgaggatgacggccgcgccgacacttcggagcgaggtcatgtgacgatccttcggtagctcgacgggttgccgtagatcttttccacgttgatgccactatgtgggttgtcggcgctaaccatttggcctccaccgatgtagacggccacgtggtgggcagggcttccccagaggatgaggtcgccgactttgagctggtcacgggccacggcagtgccgactttctgctggtcggcggcggtgcggggaaggctaatgccgatacgccggtacagcgccgaggtcaggcctgagcagtcgtagccgccatcggctttgccgttgccaccccacacgtaggcgtaggagttgttgtcggcgatcgatttggcccatgccacggcttcggccaggttcttcgacacaccggtctcgttagcggccccggtggcacagttgtttgacaggtgccctgtagtagtggatcccactatttgtttggccatggtttcccatttggcgtaggcatcgggcagggctgagccttgcactgcctgagctgcctgcgtcagcggcatcttctgccagtcagcgatgtcgactaaaccgggaatgtggaatccagggccgccggccgatccggggccagcgtaggtgatggtgtggcctttcaagaacgcctcggtggcgtaggcatcattgttgacctgatccagagtcccgtaccagcccggcaggatgcgctgctgaaaggggccggcgtcaccgtcaccgttagccttcgctgaggtagggtcggccccaagatctgattcttgtttggcggtcatgatagcgatgaccgctgcctgggtaggcagtttgtcacgctggaccacagtgacgatggtggtcacgagctgcttctgcctggccgtgaggcctccggcacccacagtgcctccggtgacggtacccacgcaagcatccccgccgacactgccaccgccgccgccagagttgtcgtcgagggccccagagcctactgacagcagcggcacaatgatcacggtcgcgggcaagaccgccaggcccgccagcatcagcactgctgcactcaccacggcgatcacgtgagatgctttcaacgctgcccacctctcgctggtttgagggggcgacgcctgctggtacgcacaggcttggttgatccagtccgccgttggttggcaggcctgggtttgatcggcttgctgggacccggtttgggctccggagtcttaggctccggcttcacatgcctaggcacttcggctgcggtgggaggagtcagcacgtggcgtactggcttggtgaccttctgggcacccgaaacaaccggcttagacaccaccttggcacctttgaccaccggtgcggctgccttcgcgccggccttcttgactgcacgatgcgctttgatagccccggcctcggcccggccaaccctgctagcagtagcatcgagggctctgtggcccgtcgttgccctcaccggtgcatccttgccctggcgggtctgcttagcgatcgccgacatgccgcctcgcaatgccgaaacatgattgtgggcgtgggcgatcgccgacatgccggccgtcgcgatttttgactggccctgcggggcccctgccccagcacgaatctgccggtaagccgccgacgtgccacgagcacccgccgccattcgcgccaccttcgcagccctagtcactcccgtcgacacgccacccgtggctaccgcagcagcacccgagaccacagtcgaggccatccgccttcgacccaatccggtgagcttgcgaccaccgctgcgcaccatccggcgagcaccccgcccagcccactggccgatcaccgagcccctttcggaacgcttgctgcgcatccaatcgttgatcttgtccctcagccccttctcgcccttgtgacgacgccacatggacatcaagaacccgataatccccacgagctcgagcatgttgacaaccatgaccttgatggcgacatcaccgtcagaggcgaaaaccgacttgatgatgagcatgaccacacccaacatcaccatcgacccgacaatgccgatcatcgagtacaagatcgaacacagatcccggatgagcggatctgtgcggccagggatagcccgcaacacgttgagcatcgacatgaacgccgaccacaccaacttgcacacgtagaaccagcacatgcccgcgaacaccagcaggaccacagccaaacccgccaccgtcgacgagtaaaagaagaaccccaccaaccacgaaccatccgcaatatcgccggcgtaatccgacaacccctcatcacagtcaccaaggtcgtcgcgagcatccgagacgtcatcgtaagggccacccttgagcacctcgatgtacttgtcgtggcacttcgcatcaataatgcggccatagttgagctgctgatgaaccggcgccacgaacgagtccacaatgatcgccgacagcttcggatccttcgagtctcccgtcgaggtcatgtcatcaggaatctcgacctcaccagcggtcgccgtcgcaggatcaaccgaactggtaatcatccgagacagcgccacaccgaactgctgggtgcgagccagcggagtagccaacgtcgtcgtatcgcctgcgaacttcgccaccggggccgccaagaaacccaacgccagcgccgcagcaatcgccgcacgcgcacccgtagcccacgccccagccgtacgtcccctcatcatcttgacgaccacgcccacaccggcgcacgtcgtcagcaacgtcaacaccgttccaccccagctgtccgctcccagcggggccaaaaccttgtcgtggatgtcgttctgtaaccccaccagcgggccggtaatccacccgacccagctcatcgccacggtccagtccaacaaccggcacagcaacgcaatgaccatcaggtacgtgttccaacacatgccaataatggaggcccacatagccttcagcggggccgtaacgccaccatcgtccatcgacatctggtactgaaacaagtgaataccgttggagtcagtcacattgaaaccgtcacccatccagcccagccccgggcccgatgccatggcaggcacactgctcagcgccaccaccagaaccagcgtggtgacgatgatacggaaccgccgctccccggccccggggcggcgtggatgacggctcacgctgtctcctggtcgtgctcgggcgggttggagctggcggcttcgcggtggggagcgtaggcaggtctcagtagtcgaatttcaccgacgttgccgtgttggtcggcgtacaggccacaaccggggcctccggggttgagggcaatcttgaccaggtcagcgaactcttcaggggacgttttagggtccacgcccaggaactcgacacctttctgggcgaggttgatgttgtcgcacagcaacacgatgcgatgctgaatgaggttgcggacggtctcgttggggtaatcggcctcggggtcgtgggagccggtgataagccaggcattggctcggcgggattcgcgcacgtactcatcgatggcgtgggaggcttccggcgaggacgacatgtgatgaaactcgtcaacgatgaaagcggcgtcgcgggcccggtcgctaaagcacaccaggcgagccagacgagcaataagcgcgtagagagcccggccaaacaccttgtgcgggggcagctgccgaaacaaatgttctgacagcatctcctcggcgttaggaagagcgatgccacaagtgccaatgatgaggatgtcggcactcaggtcggcgggaggaaggtccgggtcaaagatggccgaagctagggaggccgagttctcgatgtcagcgaacacggcaatcctgtcagcgatcgcggtggcctcgggaaggtcgcactcctcggccaggtggcgggccaaacgcccacacgaggtgatctggtggtcacgcatgtaggccggtttgaggaccttggccagcgtggtcccggccacaccgatggtctccaagttaagcaaggtcagcaagaacgactgggcgacctgcccggccatctccgggggaaggatgcgcagcgggtccagcgacagcttggggtgggccgtgtcgacgatctggcgtctaaccccgtcgatagagttgacaaaggttacccactcccgctcatcggagttgtcggtggcaataatgcgcccgccccgggccgcgatggctgcgcacagccgcttctcggccatcgtcttgcccgcgcccatcttgccgatgaacgccaccgtgttgcctttctgatcctgagtgtcggcatgcaaatcgaggtaggccagcgactgcaacggggagcctgtgaccacagccaacgggatgccggtggtacggcccaaccggtactcaaccaccgggatagatgcggcgaacgcggaggcgtgagtcagctgacggtaggcgttaagcgaggaggagaaccggccaccgggccgggcagcccacagcaagtcctcctgacggcccacgggacgcacccacgtgaagtcaccgaacaccggatcattgacgaacgctcctgccagctcctcggtggtctcaaagtcaggagacgagacagtgacggtgataagagcctggatctcgacctcacgctcatcggcggccagctcggcgttgtagtcgacgagcacctgagcggaatgctcgatagacatgagggtcgaagcctgggtcatctcaccgccctcaacattgtcgagctgatcgaccgtttgacggatagcccgctgatttttctgcatcgcagcgtgacgggtccgggccactccccggatcgccacgtcgaccggcacgccagtgtcgtcgatacggcccaaaaactcgtaggcaggccacgtcatcgtgcggggcaccttacccagcgcaatgtgggactggtagacggtctcgccggtgtcggaaccgattttgaggacgcgacgattccacgcctgagccgtccgggacatgtgggagactcgcttgtcatcctcgctggccagcaggtcggaggtcgcggcctcatcgatgaccaactcccccagcgcggcacgtccaacctcatccatgagggcgattccctcgccaggggcatcatcacgcaaccgggtcgggtggcctgacaggtgctgccgaagccagatctgttcatcaacggtgaccgggcggggttggaacgctgccggcagtttcgcaccgaattccttagcctgacggagggcccactcccgtgcgacacggccaggagcggtggtcatgagtccggcggcttcggtgattttgttgagggcggcggtccaggcggtgtgggtgcgtattttctggtcttggttgagtttgatcgataggaaccacacgcgccggcctagggattcggtttcaggctggtcgagggtggcgtcgatttcgtcggcccacacggggtgttcgctcaggtcgaggccggcggccatggcgtcgacgatttctgtggggtcggtccaggtgagggctccgttgaggcagaactcgtggcgggcgaggtggcggaataggtcgcggtgagctgcggcgacggtgagggaggcgttctcggtgacgggtcgctggaggggagtgagtcgccaagtggcccagatgtcgccggtggaggtccagacgaggttgtcgaagaggaaccgttcggggatggacatcatgactccttttcggcggcggcgaggaaggcttccaggccgctgcggcgtacagcgttcccggtagggtgcaggggttttctgggggtgggttcagatttcaaatgtgggaagagtttgtggatggtatcggtgtcctcggcgagggcttggtcgagcaggcaggtggccggggtgtcggtagtctcgtccagctcgtcgatcatctcgtcgaggaggttgggggtggtggatgcggcccacacaggtgggatagccggtgcgggtcgaggcggtgtggggaggcggagtttggtttggccccagaggggtgtgtgggtcatgccggcgggagtggtggcggcgtgagtggtcacacgccaccagcccgccagccatgccagaggtgaccaggtccagtcgatgcgaccaacaacgaactgggcgagccatccggcagccagcgcgaaaatgaaaccgcggatggtcatgcccccgtcgataattttgaagcccatcatcgcggcaggaactacgccgccgacagcgagcacctgatagatcgtgtagggcccgccaggaatccttcgacccgaagagtccttgccgatgatgcggggctgctggcgggcctcggtgtgccactgaatatccacgatcagctcttgcccaatccttgcatcatctgtccgaagaattggatcgcgttaccttcgataagccagtacgccataccacacacaaacagcatggagacgatcttggccaggctcataccgtgtttgaagatgttgaacgcggcaatgcccacgactacgaccatggcgacggctcgcaccgcggacttgccttcacctgccttgatcgtcgtccattcgaagaggttccgtgtttccagtggcagcaggaggaattgatcgagcatgagaggttttcctttcaggaagccgaccgggatggtcccggtactgacgggctgggcgacacgggtgtgccgtccggaggcagaaggcgtgacggctggtcgagggaggcaacctcccagcggcctgcacgactgacaagagtcaggccgtactggctagtccgggtagtggattcgtcaccggttagctggcatgtcacggtcgcggtgacagcgatcttctgccgatctgagggggtggggatctcgtcaggccccaccacatgagtggttttcaccgatacacacggggctgggtcaatcgccgtgaaagcggtccccgggctactccatctcgacaggtcgtcgctgccactcagcatcgcggccaagaaacccgaagaggtctgggcagccgggtcagcaggacgaatctccgaggagtccacgtcgggggctgaggccggtgcaggcatggggatctgcccaggtagacgcaaggcgatggccttgccgttggaatcgacgtggaccgggactgaccaggcctgtccgctcccggattggccgcccatggtgaccacggtgacctgccacaggctcggatcagacggggagacggtagcgtcataggcggtgacggtggtgggcgctggaccaggtttgcggggcatgcgcgcatcggtgatcttggccgccaccaggtgttccagattgtccaagtgcccggagtcagaggtcagcagaagagtagtcacctcgaccgcggtggctgaggcgatctgagctgtgcggcggtcgtgatgggtggtgtcagtgctgacagctgtggtgggagcggatgccggggccgccgaacggaccagggcaacggggccgcatgcgactccgcacagcacgagggcaaggaagcctttggtggccatcgatccggtgtggggccagggacccacgttttcctgtgcctgttttttcttggccgaccaacggcgggacttagggttagcggatgcaccttctggggtgcatgctcgtctcaatcgcatcggtcacctccttcactggatgaagggaccaaggaggtgaccgatgtgcggtcgaacccgaaaaagttcaaacttttttctgggtctgcctcaagtacgacagaaggcctgcatcatcacggcgttgtggtagcagatcttgcgtcagcgcaaatgtatgggcctcgtaggagtagctcttaggtgggtcccggtggttgcggccagggcgagggtgtcgggtatgtgtagcgctagtcccgggttcgtggtgtgagggcttttgggtgctgacatgcactacccattgctagacgctgtgctgtggcatggctggacgtctagcagacgggttgacatcacctttaggctggcagcgcccgaggccgcaggccagaggaagcggacagcctaacgattgacgtccccctctcctttccccaacctcctggagtcgatgacccggagatagatcgatgtctatgcatcggtgcatcgatatacctatgtatctgtctgtggtttttagaggccaccccccgtcgccccgggccgctcagcgataccgcaaggctgtgtgggatcagct

SEQ ID NO: 226 - DNA, 4813 bp, Propionibacterium acnes
  source 1..4813: mol_type = genomic DNA
ccgaaacgttccagcccgccctgttcgagctagccgactgcgcatgagaccccacacaaacatggttgaatcgaagggctcagccagcagccagttaccaggagtccccgtgcgtctataccgcgctgttcttacccacaccgacatccagatcaccgtccgcatctggagcaccaccgaccacgactggacctggactcccctcgacacctggacccccgacccgaccccgaccacaccagcccagttagccgacgaactccaccgacacggatggaccacccccgaggaccccaccaccctcaccaaggtgactgtgatccccgagaactggcaggccctcgtcgaccacgccctcgctgcccgaaaccaccaagccaaccagctgcgcgtcgccgagaacatcctcaccgacatcctcggcgacgccgccgacgccggcctgtctgtcaccgctctcgcccgcacgaccggactatcccgagtcgccgtctacaaacgcagcgccaaaaccatcgactccatgagacacgccacccaggccggcggaatcctcaccccctcctgtctcacccacgctgagagaacagcgctcggcctgcccgacgagtaacccatcgtttacatcctcgactggtccctgcgaccagtgaaccgtgcccccactgcgcccacaatgatcagcacacccacggcgaccaccaggtgggaagcactaactgatcccaacgaaccaagatcaaacaagccctgcccgggagcgtcgagcagtccgtgggcgcgaagccatgctccgagattgccaatgatcttggggatcatcttgttcagtagggctatccctccgatgccgacaacgaggaagacgaggatttcttcgcctgcgttgtttcttcctgtgtttgcggtcatgctgccttctcggggtggatggccagccagctgatgaggttgtcggtgatctgccctgagatttggatcagttcgacttgcccggcctgccatgcccgcgatgtgccggccagcaatgatgctgggacccctactgcgcggccacgggatgcaacctcagccaaggcggcgcgtaactcctcgacggtgctttcgatgtaccaactgccgtcagtactagtctcggtggcgtcggtggtagcgataagagcatcggtgaggtcgtcgacggcgcggtccagatcagcgatgtccggtagggctacagcagtcatggtgtgtcttccttctagggtgccttcactggtgaagggtccctagccccggccgatgtgcggtgctgtgggaaaaatgcttcccattggtccgtcttagttaggaaacttggcctaagtgctgtcgagggtcgcgtgttcgtgaccggttcgaagacactgccgctttgccttcttgcccgtggcgcttccgagatgggttcagtgggcgatggctaggccgatgagggcgccgctgcacaggctgggtgcccaggggaggaatcgggtggtgtggtgtcggcagcggtcgatgagggcatatagggcgatcagggtgaggccggctatgaccgtggcgtggatcgtgtcgatgccggttgctgcggccggggctgcccacagtggtgtgatgcgcacgtcggagaagccgaagccgcctcgggagatgagccaggcgatcatccacgccgcggagatgacgacagtagcgatagcagcacggatcgccgcagtctggttcgcgagagcgatcatggccacagccccgatccatccaacccagccggtccaggcgaggactgccggtatccatgtggtgatggcgtcgatgacggctacccatgccccgatggtggctagcagagcccaggccggccaggtgggtgctggggcccacgctacggcggcgatcatggttgtcgcagatgcagcacagacagcgatcatgcttcggagactgtaggtgtcgcggtaggcgattttgtcgggggtggcggtggccggttcgggcaggatgcgagtgagggagggccatcctgcggtcgcaatggtcacgacggcggcgatccacacgatctggtgcatgggtctcatcatggcccaatatcgatgggtgtgggtggccgacatgggctcagtcgtcaagaggtgtacgggcggttgtggcttcttgggtgccgagcatgagggtgccagaatcctcgccggctgattcccagtcgacgatgacctggtcgccgtcaacgctggattcggcgatggtcacccattgcccgtccatatcgatgagcatcccggcggccagctctgtggcggcaaccgggtggggtgggctgtagaggaggtcgatgtcgcgggcagggtcgtcgggttcttcggttacctcgggtggggtcgatctggctgtctcggtgtcgtcggccaggtcggctcccaggatgcgttcccattcggggctggttttcttgcccgatgaggccatcgtctcgtcgatctgttcgtcagtgggccacacaaatttctttttggtccaggtcgtggtgtcgggtcgcagctgatccagcagttccaggtcttgcggggagtgggccttgcgggggtcgggggtgtagaagaattggacttccttgggggctgattcgccggataggtaggtgcctcggccgcgtttgccgaacgggatgcccacgccgacgtgttcggagccgaacatcatgcgggctccgtcagcagacaggggtccggtggcggcacgcccggagaagttgtctcggatttcgccgcccaggaactcggcgtcggggcgttgggtccccagatcgacgtggatacggcaggcggctgccatgcgcagcagggagccgatccagccgaaaacggggcattctccgggcatcccagagaccttgatcgttgaccaccagtttttcgcgttgccgtagaactggcggtactcgtcgatgaggaccagcacgcgggtgaagtcggtctcgcgggccccttcttcttcgatgcggcggtagcggtcctccatgagagaccacagccagtggatgagggcgacctggtcggggacggtagtggcgaccatctcgatgttgggccactcccgcaggcccaggtactcgatgcgtttagggtcgatgacgaagacgcgccagttgcggcgggcaccctcgacggcgtcgccgatcatggacaccgtttttccggtacgggtgcggccggccttgagctggtgggccatgacaccggagatgtcccagaaacaggtgttgccgtcctcgtcgacggcctgggggattttctcccagtctggggagtctgggcccggaagggccacgggtcggggcaccatcgagggcagggggtggcggcgggtgacggtgatggtgtcgtgttccaggtcgaagtcgctgcgccactggccgagcatcatcgccgaggtcaccgcggccaggcgcaattggatgttcgggctggacaaatgggcgccacgttggtggtgaatggtgaagccgtccaggttcccccgatcggttttccaggaatcgacggtgaccgccgacccatagatctgagtggctacttctttagcccgttccttgtctcggtccagatcggttttgtcagggtcaggggtcggggcgcggtattgcaggacgaaccggccggccgggatcgttgcggatgtcaccgtgaactctgccggcgaccaggcagccgcggccgcctgggtgagggccattggcatggtctcgacggcagcctcttcgggggggatggtgagggtcaggcgtcgcggatgcgtcttcttgcgattccatgtgactttctgcctcaccggcaccttcgccgccgactgaatggctaggcgagctgattcggcagtttcggtacgccggccagcgcgtagcgcccgtcgtgcgtgaaggctgcccaccacagcacagcccatacacggcagccaccagcgcggatcagcggctgctgcatagcccccggtagctagtaccgcacctgaccagccggccgcgatacttttccacgccggtttcgcgccaccaggaccagcgttatggacggtctgcttcgaggctgcggagggacgagacagcggagtgctggtcatgccgcggcctccttgtggcaggtcatttcacaggcatgccggccagcgatgatgccgtggcgcaccgccccggtagccgcatagaccgcgcacaactcaaacacggggcacccatcgcaggccgccgggttcatgctttctttgtcccacgatggtgggtcatcggtgcacggcacggccaggccatcctgttgagcggcgctgatagcggtgaataggcgcagctgggcgcgaacttggtctggggtcaggttgacggtgcgggctacacgcatggggttccttcctcttcaccagtgaaggttccctagacccggccgatgtgcggagagatttcagtgttttatcgaggtgaccagccatccggtctgcgctgcgggttcaggtaccagggtcagatgcaccacggtgtggtcggctaggggcacggcgaccaggggcccgtcggcgctcgccccggtgagggtgggagttccggccacggtggtggcaggaatctggttgggtttcgcggccatcagggagcccatgagggtcggtgcggcgatctggacgagggcgactttgcgggcggcgggatcgcgggtcaaccagccgcgggtgaaagcgagcgccgccgacgtgatatcggggctcagcggggctggagtggcggctgggtgggccgttgaggagggccacacgcgcggtagcg

SEQ ID NO: 227 - DNA, 1095 bp, Propionibacterium acnes
  source 1..1095: mol_type = genomic DNA
acaccgatcaagcggcctgtatcggcagcattgccgtacctctgcccggcctgatcctcaagccacgacaacgcatcccggaacaaccgcacgtcctccagggctaaaccgcagtcgtagccgcccttgtcccccaacctcacaatctggcgctcccggcgtcctcttttgtcgacctcgatccacagtttcgcgtgcatccgctggcctcggccttctgacaggatctcggtgagcaggtcggacgcctgccctcgcgcatcctcgttactgcgggggaattggagtatgtgggaggaacgacgatggggaaggttggtgacctcatggcgcagcaggttgcgcttgcgcatctgctgatcgagacgctcgggctgacctgttgacggggttgagccgtggcgccgcttcctcggcggggtctcgatccgttgctcttccggcggttcggcgtcaggttgtggtgcgcgatctcccctaggacgggggggctcgccacctatatccgagggacgatgagacggccttccacgcttgctgcgcactttcgcagcccgccccttgcggtcacatcgacgcggcggcggagtgacgtcctcaccgcgcgctagctgcgtcaacgccgacaccaggttggtgcccggtttcagcccttttagcacgaaccgcaccaggcgggggtctcggccgattcgtcgggcaatctcggcttggctccacccctcggctaacagggggcgcaacaagtcttgggcccggttatcacgctcagtcactggtcgccccctcggggagtcctgcctgctcggcctgctctgatagagcagcccgttccgatccggtctggggcgctttcaggggaccgggtaggacacctttgacacgcagccgcccgtccttgccgtcatcgccgcccccctgggccacagggagcgcccaggggggcacgttgctggtgtagatggcgtcgccgtggatagccagcagggtgcgggagttcatgcgtagtgctcctcccttggttgtggcgttttttccggtggtggggtcggcgatgggtgtgttgagggtgcgtacgcgggacagggcccagat

SEQ ID NO: 228 - DNA, 718 bp, Propionibacterium acnes
  source 1..718: mol_type = genomic DNA
ccggggccctgctgctggtgtgggacgtcaccgttttgaccgggcccactctcggccaccgcgtgcgtcctctcagtaaggacgccgagctgactgcccggcgctggctcgaccaggtcgccgacaaccccggcttcctcgacacccttatcgaggccgcccgcatcaccgatggatggcatcacgcgacgcctccgcacattcaggccccttaccggacccttcatcagtgaacggaggtacaacgacatgaccagcgacattgacattgaccggacccacaaacccgacgaccgcgccgaggctcctctttaccggtcctgggccaggagactcgtgcacgtctccgggatgccctggcgtatcgtcgccgccttggccggggtctcccccacctccatgcaccggcttctattcggccgcaacggtcgacccgtggaatggatcggcatcaatgatgctcgcgccctgatggatatcggcatcgatgatctcgcctcagcgtccaccgaccgtatcccggcccgcgaatcccgcgagctgttggtagccctgcacaccctcggctggaccgatgagcatctaagccgctggctgaccagttccgacctcgacctggccaccacccccaaggccctctacgtcacccggctatccgccgcccgcatccaggccacctacgacatgctcatcagccagcccgtccgccgctgcggcc

SEQ ID NO: 229 - DNA, 7861 bp, Propionibacterium acnes
  source 1..7861: mol_type = genomic DNA
tttgtccacccacccctgtcgattttgtccgccaagtattagacaaaccattagacagtgaattagaccctgggtcgcgtcagcgtgtgaactcaccaacgcgcgcgcgcgcggcggccgagccgccgaagccaaagaaacccataccaccaacgcctgaaccagcagcccccgcttcagacagtcctgtgtcagcgcacgctgatgaggctgccgagttggcgtggcagttcgtggggtggtgtcctcagctggtaggggcaccgaagaaggtgcgtggccagctccgccagatggtcgctgccgagatccgccggaatccgggctggctggatgcgccagcgttggaggttgttgcccagcgggtacgtgctgaaggtgcgctgggggtccagcactgtgagattgtgcgagccgagctgcacggggtgatcgccgaccagaaggccgcccccgcccgccccgacgccctgcacgcgcgggagcccaagtggtgggacgacgtgtactacgaaggaaacacaaccgtgtggtacgactctgacgaaaccagtgacgacgacgaggcgtggaaccggtcgcaggtatgtcatgttgctgagcgtgacgacatggctggcgggattgctaccaacctgctggcctcccacgctgatgatccgatggcctggctgactcgccgtcaaaccatgctgatggctcgtttcccccacgcccagaacgaggtcatcgcgatgtgccacatcgtgcgcaccgccctggaggccgacatggccgccggaacccggtgggaggactgatgagggtctcccggcgcgccctcatggccgtggcccgtgccgacgctgccgcagcagaccatgccaccggccgatgggtggccacagccaacgccaccgtcgcccggctgaccggactgtgcgaacgcaccgtccaatacgcccgcgccaccctggtccacctgggcctgtgccgcgtcgtggccaccggccgctacctcaccgccgacgagcggcgcacggctgctcgcacccatggcggccgccagatgcgcgccgcctccacccgcgtcctcaccatgtcctgcgcaatcgtttgcgccctaccccgaaggggtcaccactacaggaaagttaagttcctagatggtcaccaacgcacgcgcaggcgcgtgcgaaggccagcaacaccagagaagaaacccctgtggctgcaaaaactcgcagccctcctcgaccagcacctgccctggctggtgagaaaccatcacatcggccgactgtgccacgccctcaccgccctgggcatcgacgaacactggcaacccgcagacctcgacgccctcctcgacgccatgaaccgcaggaaccgtcgcctcggcctcgacgtgccatgcgccgacgaccagcacaaccccttgggactgttcatccatcaggcccgagacaccctcacccacgacaacccccatgaacgccgcctagcccgtgacgctgaacgcgcccggctcatcgacgaccaactccgccgccgcgcagaaaccgccacctgcgcagcccgcctcgcagccgagcacgccgaccccgactaccagacccgccgtcgtgaacgcagggaaaccctgcgagccacactcagggccgcccagcagcatgtcaggacacactgatacccgctcatacgcacaccatgaaacacgacaagccacctgacagtatcagctgcaagacgcatgacaacatagaaggacatgatgaaatacacatagacacaaccccgcacagcagtttcgcaacaaatcatgatagtctcatggcagtatcgcttgatacacacatagcatcactcccacataggcagttatgctgatatactcctactaggttatccgtccaacatgctgagtgggttcctgtacagcatgaaaggagcatggcatgatatgggccgttctcaactgcaagggtggtgtcggcaagacgaccagtgccctcctgctggcggcagccgccgccaagcagggccacaccaccctggtggccgacgctgacccccagggcaccgcatcccagtggtcagccctggcaaccaaaaacgacgaacccctgcccttcccggtgcaagcggtcaacatcgccaccatggaggcactgcccaccaccaccgacgcccatgatctcatcctcgttgacacacccccctcggcaggcgatctgatgttccaggcatgccgcatcgccgacctcatcatcatccccaccgccacctccggacccgacatctcccgaacatgggtcaccatggacgccacacaaggcacaccacgcgcgatcctcctcacccaaaccgaacacaaccgtgtcgtctaccgccaagctcgcactgccctcgccgccgacgacaccgtcgttctcctggaccacgacatcccccgccgtgaatccatccgcacagcatggggcaccaaccccccagacgacgtcatcacctactacctgcccgtcctcaacgaactcatggaggccctgtcatgaccaccaagaaaaccgacccattcgcccgccagaaagcagcagaagaccgcgcccaccaactccaagacgaagcccaacgccacgcccaccccaaacgcgtcatcggccccaccgcacgattccagttcgtcctgccagccgacgtgctcaccggcctcaaacacctcgccctcacccgcggcaccaccgcccgccaactcaccctcgacgccctcgacaccgcctacggcctcgacaccctcgccaacagcgggaagaaaacccacccatgacccgtgggtccccctgccaccaccccctcgacggcaactgtgtgcgagccacaggcccgcacacaggcggcagcccagtgccgtccccgccaggaaaggaactgaacttttctggagtgctggctccctatcaccccttatggtgctatcagatccagtagcgccagcccgagaggaaacccatgagctacatcgtccgcaccggaaatctagccggcacccccgagctgcgcgaggggtagccgacacggcggaccgtgcccctgacagtaagcggcactactggagacatcaccatgaccgctcagatcctcgccccgtgcaaccagaaggctgccgtcatcgaaggagccctgccatgaaccaacctaccccccacaaggccgacgagtcacagacgagcaacaccacgaggaagtggcggcacaaggtgtcgttctaccaagacccggccgacaccgaccgagtccgcggagcgatcctccacaccatgacaaccgaaggcaaccggaacctgagccagttcgtcaacgatgccgtcatggccaaggtgaccgaactggaagcaaaatacaaccacggcgagccattccccgccgtgggagcccgaggactcccccagggcggcgcagccgccaacagataagagggcggggaccaccaatagcagtcgatttcggatccagatcgggtagacaggacccatgatgaatttcatatcctccctgctctcggccatcctgaccctctttgcgatggtagccgtggcgataggagtggtgaacattgtgccgggaatatgcgccatcatcggtgcacggaaatacggcgaccaggaccgtgtgcgggcaggacaacgaaagatccttcttggtgctatcgccttggtggtagcagtaggcattcacccgtgacccacggttaccggaagccccgccgcaatcgataccactgtcagtaccatcaggggcgataggggtcaagctctccttgtcacaatcccttccccggcagcccagtaaccgtcgcttacagccatacatggatatgcgcccattcgtcggcaccgacgccgtgcgggttggcgacgctgacccgtctgctcacaaacgacccttccagcccagcaccacccactacaccgacacgatccacgaagctgaaaccgaacctcccatccccgtccgaaacatcaacgaactcatcaaccccaccaaccatgcatgaacgcacgatcgcctaccggccagccttcctgcgcgacgtgaagcggctcaaaaacaagcactacaacatgaacacacactcaaatgggcggtaaggtcacgaagtcgacgtggctgcctcacggatggcttcggcgagctcttggggtcgactccacatgggccagtggccggttggcagatccatcgcggtgaagttggtcaggtgcgcgacggcgctgaacatcggattgcctgctgcggccagctcgaggacctggacgctgggaatggagcagcagatcaacgtggttagtacatcatggcgagcgctattggacagcgcgacccgtgcccgggccacttgcgcgggttcaggaaccgcccgtgcccggaaccggtcaaggtgctcgttgctgaggccctctaaactggcctgcttgccgagagtatcgaagtcaggaagtggcagctcagctgtttcctcaggtagatctggtgcgaaggcacctccatcgctcatgggaccggagtccacccagacgatccgatggaccaactctgggtgcctgtctacaactaggctcaccggcccgttcgcgccactgtgtcccaccaggaccgcatcgccgcccatctcgtccaggatggctgagatggcgtcagcttggtcgtcgagcgtgcgcgtagtgcgctgggtgtcctccggatcgaggccaggcagcgtcagccccacggctcgactgccagcagtgttcaataactcgactacctcgtcccaagcccaggctccgagccagtaaccaggaacgaggacgataggccgatgctggtcaggtcgcgatgttgaagtcatggagacatagttgcacagtgcgcggacaagggagtggcactatttctggcatgaatttagatctgggtgtccggtgaggcgatcagaacgcctccatgtactgtccgagtgtctacgatgcagcggacacagtcgagcagctggctcacaagtttccaggtgtccttctgcccctatgagggaagtcggctgctctcgcaacctttgagggctgctctggggtcggaaccagttacagatcgttcaagttccgggaactaccgccggtcacgctgattgattcccgggcgatctcgcttctgacgacagtggtcggtaaccgagaggcgtcctactctgaccccgctgctgcggtgagtaaatcacgggcgtcccggatccggccacccgtccaagtgccagccagcttgatcggctaggcatcgtcaaggagcgacgatgaggtgatgatgcgatgtgagcgcaccgcgaagtgaggtataaagaagccttcccgggcgcatgcgtcgcccaggaaggccaggttggcccctggacggctgaatggttgggcggatcaggctgtagcggagacgtgcagtacctcgtaggcgatggcgttggttgggctctggtctgcatcgtggctactgagttcgacgaggatgacggtccaggtggtgatgtcgacggcggtgacgcgggcgatggtggaatcagtggatgctgcaaggaagtcggcggttatgtcttcgatgcagtgggacggagcagtgctggtgggcaggggcacggtcttgacggtcaggcttcgggcagcagagtaatcggcggttccgttaacaagctggtggacggtccagtcctggatcgggtgccggccgaagtcgcgtacgatagccgagtaaccaagttcgccccagcagaactggcgcatcccctctatgtcgcgccagacgtagaagggcgcgtaggagttctggggtgcgcctttgaccttttcttggatgaggtaggccttgaactccagtccatggtagccgtccatgaggtgtccagtctggatgacgcggtcgcggatgatctgcatgtcatagtcggtgggcagggtgatctgatattgcatggcgtacatcagcggttctccttggtttcgtgggagtaggtcgtggggatgacgggttcctgccaatcgatggttgacaagtcgtcggcggcttgttggtaggtaaggtggatcattggctgtttgagtgcagcgccatgccagtgtctctggccggcgtcgatccagatggattcgcccttggtcaggtgctggggtgcttgtccttcaatatggaccagggcaacgccgcccgtgacgtagaggccctgtcccttggggtgtgtgcctcagcggcaaacgtgacggcgtgggcggcacgcccggcgtcttccgtggcacgatcggccggatccatggcggcgcgcagctgctgttctgcagccaggcgtccaggtcacggcgggcagcatcgacacccagggcagcctcgacggcttcagggctacgacgctggccgggctggttgaccgcagaccactggtgccgggcgtcgtccagatcatggccggcggcgtcgatgagggcggtggtggcttcggcgcagcatcgcctgatccactccgaacgtgacaggccagctgtctcggcggcactgtcaatgcgcgccaggagagatttcatgggcgctcatctgtagcctccagataggcgttgatgtagcgcagagcctgatccgtcatgtcgatggcggctgcctcggcagacgacacaacgggctgtggatgataagaccacccaacatagacggcgaacatcaatttctcgacagctttcatgaggtccccggcggcaaccgcatccgcctcatcatccgaggagaaccacttcaggtctgaacggctgtacatagcccctaggtcctgatgtgggtcgaggtccttggaatgatggaagttcctacacacccatcgccaaagacctcaacatggacaacgctaccttcaccactccctcatctgtgaagagccagtttatgcacggtgttgaaagaggcgtcggtctacgacgaatgcgggttaatggtcttgcggtgtggggcgctgggcgatggcatcgagaacgcgtgagtgggtggcgatccattcggccgcgtcggggttgatgttgcgggcgacggtgtcgatcgctgttacgtagtgggcaagcctgcgaatctcagcttgttggtcagggtgatcgctgatgagaggctcttgatgggaggcgcggttacggacgtggcggatgagctccacgttttcctcgaagtcgcgtcggctacgccccgggtagtgaggcatacctccgttacgtaagtcagtgagagctttccatacggttgcttccaggcgcggggtgagcagaaagcgccagttgtccagtgacagactcgccacgatctgatcaggggtcgcatcgagcctcgcgcgccgcagtcgcttctcggccctggcgacgttacgcgggaaaccaccgagccgatagctcggggattcccaccaacgccgtatgccagtatcggcgctcaggcgcacgtcaatgaagtttctcaggagtacctcgacatggctgatgtcttccaagaacgctttcgagatgcgggtgttccacacgtaccacgcatcgactggttcgatccggtagcggctgagcctggcgggtgagaaccactcctgcaacgtctcacgactcaccgtgggagcgtggtaggattgatgacgataggcctcgggaaggtcaatgccgcgaaatatcggtatacccccgaggtcattgttttgcccaggcccctcctcgcatacttgcggggcgtcattggctgccgtcatctcgtctcttcccggtacgtggctgtccatgttcacgggcaggtacggcaatgaggttcccgcacacaaacctctaccaagcatacgctggcaagcccc

SEQ ID NO: 230 - DNA, 7938 bp, Propionibacterium acnes
  source 1..7938: mol_type = genomic DNA
tttgtccacccacccctgtcgattttgtccgccaagtattagacaaaccattagacagtgaattagaccctgggtcgcgtcagcgtgttagctcaccaacgcgcgcgcgcgcggcggccgagccgccgaagccaaagaaacccataccaccaacgcttgaaccagcagcccccgcttcagacagtcctgtgtcagcgcacgctgatgaggctgccgagttggcgtggcggttcgtggggtggtgtcctcagctggtaggggcaccgaagaaggtgcgtggccagctccgtcagctggtcgctgccgagatccgccggaatccgggctggctggatgcgccagcgttggaggttgttgcccagcgggtacgtgctgaaggtgcgctgggggtccagcactgcgagattgtgcgagccgagctgcacggggtgatcgccgaccagaaggccgcccccgcccgccccgacgccctgcacgcgcgggagcccaagtggtgggacgacgtgtactacgaaggaaacacaaccgtgtggacgtacgactctgacgaaaccagtgacgacgacgaggcgtggagccggtcgcaggtatgtcatgttgctgagcgtgacgacatggctggcgggattgctaccaacctgctggcctcccacgctgatgatccgatggcctggctgactcgccgtcaaaccatgctgatggctcgtttcccccacgcccagaacgaggtcatcgcgatgtgccacatcgtgcgcaccgccctggaggccgacatggccgccggaacccggtgggaggactgatgagggtctcccggcgcgccctcatggccgtggcccgtgccgacgctgccgcagcagaccatgccaccggccgatgggtggccacagccaacgccaccgtcgcccggctgaccggactgtgcgaacgcaccgtccaatacgcccgcgccaccctggtccacctgggcctgtgccgcgtcgtggccaccggccgctacctcaccgccgacgagcggcgcacggctgctcgcacccatggcggccgccagatgcgcgccgcctccacccgcgtcctcaccatgtcctgcgcaatcgtttgcgccctaccccgaaggggtcaccactacaggaaagttaagttcctagatggtcaccaacgcacgcgcaggcgcgtgcgaaggccagcaacaccagagaagaaacccctgtggctgcaaaaactcgcagccctcctcgaccagcacctgccctggctggtgagaaaccatcacatcggccgactgtgccacgccctcaccgccctgggcatcgacgaacactggcaacccgcagacctcgacgccctcctcgacgccatgaaccgcaggaaccgtcgcctcggcctcgacgtgccatgcgccgacgaccagcacaaccccttgggactgttcatccaccaggcccgagacaccctcacccacgacaacccccatgaacgccgcctggcccgcgaacaccaccgcgcccaactcatcgacgaccaactccgccgccgcgcagaaaccgccacctgcgcagcccgcctcgcagccgagcacgccgaccccgactaccagacccgccgtcgtgaacgcagggaaaccctgcgagccacactcagggccgcccagcagcatgtcaggacacactgatacccgctcatacgcacaccatgaaacacgacaagccacctgacagtatcagctgcaagacgcatgacaacatagaaggacatgatgaaatacacatagacacaaccccgcacagcagtttcgcaacaaatcatgatagtctcatggcagtatcgcttgatacgcacatagcatcactcccacataggcagttatgctgatatactcctactaggttatccgtccaacatgctgagtgggttcctgtacagcatgaaaggagcatggcatgatatgggccgttctcaactgcaagggtggtgtcggcaagacgaccagtgccctcctgctggcggcagccgccgccaagcagggccacaccaccctggtggccgacgctgacccccagggcaccgcatcccagtggtcagccctggcaaccaaaaacgacgaacccctgcccttcccggtgcaagcggtcaacatcgccaccatggaggcactgcccaccaccaccgacgcccatgatctcatcctcgttgacacacccccctcggcaggcgatctgatgttccaggcatgccgcatcgccgacctcatcatcatccccaccgccacctccggacccgacatctcccgaacatgggtcaccatggacgccacacaaggcacaccacgcgcgatcctcctcacccaaaccgaacacaaccgtgtcgtctaccgccaagctcgcactgccctcgccgccgacgacaccgtcgttctcctggaccacgacatcccccgccgtgaatccatccgcacagcatggggcaccaaccccccagacgacgtcatcacctactacctgcccgtcctcaacgaactcatggaggccctgtcatgaccaccaagaaaaccgacccattcgcccgccagaaagcagcagaagaccgcgcccaccaactccaagacgaagcccaacgccacgcccaccccaaacgcgtcatcggccccaccgcacgattccagttcgtcctgccagccgacgtgctcaccggcctcaaacacctcgccctcacccgcggcaccaccgcccgccaactcaccctcgacgccctcgacaccgcctacggcctcgacaccctcgccaacagcgggaagaaaacccacccatgacccgtgggtccccctgccaccaccccctcgacggcaactgtgtgcgagccacaggcccgcacacaggcggcagcccagtgccgtccccgccaggaaaggaactgaacttttctggagtgctggctccctatcaccccttatggtgctaccagatccagtagcgccagcccgagaggaaacccatgagctacatcgtccgcaccggaaatctagccggcacccccgagctgcgcgaggggtagccgacacggcggaccgtgcccctgacagtaagcggcactactggagacatcaccatgaccgctcagatcctcgccccgtgcaaccagaaggctgccgtcatcgaaggagccctgccatgaaccaacctaccccccacaaggccgacgagtcacagacgagcaacaccacgaggaagtggcggcacaaggtgtcgttctaccaagacccggccgacaccgaccgagtccgcggagcgatcctccacaccatgacaaccgaaggcaaccggaacctgagccagttcgtcaacgatgccgtcatggccaaggtgaccgaactggaagcaaaatacaaccacggcgagccattccccgccgtgggagcccgaggactcacccagggcggcgcagccgccaacagataagagggcggggaccaccaatagcagtcgatttcggatccagatcgggtagacaggacccatgatgaatttcatatcctccctgctctcggccatcctgaccctctttgcgatggtagccgtggcgataggagtggtgaacattgtgccgggaatatgcgccatcatcggtgcacggaaatacggcgaccaggaccgtgtgcgggcaggacaacgaaagatccttcttggtgctatcgccttggtggtagcagtaggcattcacccgtgacccacggttaccggaagccccgccgcaatcgataccactgtcagtaccatcaggggcgataggggtcaagctctccttgtcacaatcccttccccggcagcccagtaaccgtcgcttacagccatacatggatatgcgcccattcgtcggcaccgaagccgtgcgggttggcgacgctgacccgtctgctcacaaacgacccttccagcccagcaccacccactacaccgacacgatccacgaagctgaaaccgaacctcccatccccgtccgaaacatcaacgaactcatcaaccccaccaaccatgcatgaacgcaagatcgcctaccggccagccttcctgcgcgacgtgaagcggctcaaaaacaagcactacaacatgaacacacactcaaatgggcggtaaggtcacgaagtcgacgtggctgcctcacggatggcttcggcgagctcttggggtcgactccacatgggccagtggccggttggcagatccatcgcggtgaagttggtcaggtgcgcgacggcgctgaacatcggattgcctgctgcggccagctcgaggacctggacgctgggaatggagcagcagatcaacgtggttagtacatcatggcgagcgctattggacagcgcgacccgtgcccgggccacttgcgcgggttcaggaaccgcccgtgcccggaaccggtcaaggtgctcgttgctgaggccctctaaactggcctgcttgccgagagtatcgaagtcaggaagtggcagctcagctgtttcctcaggtagatctggtgcgaaggcacctccatcgctcatgggaccggagtccacccagacgatccgatggaccaactctgggtgcctgtctacaactaggctcaccggcccgttcgcgccactgtgtcccaccaggaccgcatcgccgcccatctcgtccaggatggctgagatggcgtcagcttggtcgtcgagcgtgcgcgtagtgcgctgggtgtcctccggatcgagacctggcagcgtcagccccacggctcgactgccagcagtgttcaataactcgactacctcgtcccaagcccaggctccgagccagtaaccaggaacgaggacgataggccgatgctggtcaggtcgcgatgttgaagtcatggagacatagttgcacagtgcgcggacaagggagtggcactatttctggcatgaatttagatctgggtgtccggtgaggcgatcagaacgcctccatgtactgtccgagtgtctaggatgcagcggacacagtcgagcagctggctcacaagtttccaggtgtccttctgcccctatgagggaagtcggctgctctcgcaacctttgagggctgctctggggtcggaaccagttacagatcgttcaagttccgggaactaccgccggtcacgctgattgattcccgggcgatctcgcttctgacgacagtggtcggtgaccgagaggagtcctactctgaccccgctgctgcggtgagtaaatcacgggcgtcccggatccggccacccgtccaagtgccagccagcttgatcggctaggcatcgtcaaggagcgacgatgaggtgatgatgcgatgtgagcgcaccgcgaagtgaggtataaagaagccttcccgggcgcatgcgtcgcccaggaaggccaggttggcccctggacggctgaatggttgggcggatcaggctgtagcggagacgtgcagtacctcgtaggcgatggcgttggttgggctctggtctgcatcgtggctactgagttcgacgaggatgacggtccaggtggtgatgtcgacggcggtgacgcgggcgatggtggaatcagtggatgctgcaaggaagtcggcggttatgtcttcgatacagtgggacggagcagtgctggtgggcaggggcacggtcttgacggtcaggcttcgggcagcagagtaatcggcggttccgttaacaagctggtggacggtccagtcctggatcgggtgccggccgaagtcgcgtacgatagccgagtaaccaagttcgccccagcagaactggcgcatcccctctatgtcgcgccagacgtagaagggcgcgtaggagttctggggtgcgcctttgaccttttcttggatgaggtaggccttgaactccagtccatggtagccgtccatgaggtgtccagtctggatgacgcggtcgcggatgatctgcatgtcatagtcggtgggcagggtgatctgatattgcatggcgtacatcagcggttctccttggtttcgtgggagtaggtcgtgggggtgacgggttcctgccaatcgatggttgacaagtcgtcggcggcttgttggtaggtaaggtggatcattggctgtttgagtgcagcgccatgccagtgtctctggccggcgtcgatccagatggattcgcccttggtcaggtgctggggtgcttgtccttcaatatggaccagggcaacgccgcccgtgacgtagaggccctgtcccttggggtgtgtgtgcctcagcggcaaacgtgacggcgtgggcggcacgcccggcgtcttccgtggcacgatcggccggatccatggcggcgcgcagctgctgttctgcagccaggcgtccaggtcacggcgggcagcatcgacacccagggcagcctcgacggcttcagggctacgacgctggccgggctggttgaccgcagaccactggtgccgggcgtcgtccagatcatggccggcggcgtcgatgagggcggtggtggcttcggcgcagcatcgcctgatccactccgaacgtgacaggccagctgtctcggcggcactgtcaatgcgcgccaggagagatttcatgggcgctcatctgtagcctccagataggcgttgatgtagcgcagagcctgatccgtcatgtcgatggcggctgcctcggcagacgacacaacgggctgtggatgataagaccacccaacatagacggcgaacatcaatttctcgacagctttcatgaggcccccggcggcaaccgcatccgcctcatcatccgaggagaaccacttcaggtctgaacggctgtacatagcccctaggtcctgatgtgggtcgaggtccttggaatgatggaagttcctacacacccatcgccaaagacctcaacatggacaacgctaccttcaccactccctcatctgtgaagagccagtttatgcacggtgttgaaagaggcgtcggtctacgacgaatgcgggttaatggtcttgcggtgtggggcgctgggcgatggcatcgagaacgcgtgagtgggtggcgatccattcggccgcgtcggggttgatgttgcgggcgacggtgtcgatcgctgttacgtagtgggcaagcctgcgaatctcagcttgttggtcagggtgatcgctgatgagaggctcttgatgggaggcgcggttacggacgtggcggatgagctccacgttttcctcgaagtcgcgtcggctacgccccgggtagtgaggcatacctccgttacgtaagtcagtgagagctttccatacggttgcttccaggcgcggggtgagcagaaagcgccagttgtccagtgacagactcgccacgatctgatcaggggtcgcatcgagcctcgcgcgccgcagtcgcttctcggccctggcgacgttacgcgggaaaccaccgagccgatagctcggggattcccaccaacgccgtatgccagtatcggcgctcaggcgcacgtcaatgaagtttctcaggagtacctcgacatggctgatgtcttccaagaacgctttcgagatgcgggtgttccacacgtaccacgcatcgactggttcgatccggtagcggctgagcctggcgggtgagaaccactcctgcaacgtctcacgactcaccgtgggagcgtggtaggattgatgacgataggcctcgggaaggtcaatgccgcgaaatatcggtatacccccgaggtcattgttttgcccaggcccctcctcgcatacttgcggggcgtcattggctgccgtcatctcgtctcttcccggtacgtggctgtccatgttcacgggcaggtacggcaatgaggttcccgcacacaaacctctaccaagcatacgctggcaagccccgacgagacgacgcctccgcccgccacaccaacggtcaccgccacggccacggtgaccgtgaccgtggcaccg

SEQ ID NO: 231 - DNA, 770 bp, Propionibacterium acnes
  source 1..770: mol_type = genomic DNA
taggcgccccttcggggcacctgtaagcctgtattgctgcggtttacagccttggcacccaaaggggcggcaaggggccaggaggggtcattctgcgccgctgatggcatctcacatgtgagttattctctcaactatcctttaagtcaagcgtattagattatttatccagtactcttgacagtctgtctatcgggctatatatttataagcagaacgagagatcgggaaaggaatcaacgatgaagtacaccgcacacgtcaacatggtgaccaagccctacatcggacttcccactacccgaaccccctacaccctcgtcgacgccgactgggccacaacatggatgatcgacgaaacctacgaagcccactaccacggcaccagcatggagatcagcatctacggcgaaggccccgactgctccgtactcaccaaccgcatctacaccgaccagcccaccgatgtgaccgctgcactcgccggctacggcttcaccatcgacaccaccaacacatccaaaaccatcctcacgctcacccgcacagccaccatctcccacctactagccatcctcgatggcctaccccaagctgaggggactcactggctcaacactcaacccgacctccaccacatcaccctcgacgactccaccaccggctgggccaccaaccgcaccgacgacaccgacaccggcgtctgctacgacaccagcacccacaactggcagatctgctgacagcatgacgggcctgcccttgaaggg

SEQ ID NO: 232 - DNA, 504 bp, Propionibacterium acnes
  source 1..504: mol_type = genomic DNA
ttcatgatcgcagtgcccgatacaaggtggagcggcccacaccaagctgggccgccaccttcgttttcgggacaccctcggcaacgaggcggcgagcgcgggcaagctggccctcgctcaatgccggtttccggcctcgatagcggccctgcttcttcgccaccgcgatcccctcggcctgtcgttcatggatcaacgcccgctcgaactcggccaaggcacccagcagatgcaacatgagctggctcaccggatcagcggaccccggcccatagacctgacccccttcaagggcaggcccgtcatgctgtcagcagatctgccagttgtgggtgctggtgtcgtagcagacgccggtgtcggtgtcgtcggtgcggttggtggcccagccggtggtggagtcgtcgagggtgatgtggtggaggtcgggttgagtgttgagccagtgagtcccctcagcttggggtaggccatcgaggatggctagtaggtgggagatggtgg

SEQ ID NO: 233 - DNA, 6850 bp, Propionibacterium acnes
  source 1..6850: mol_type = genomic DNA
attttgtccacccacccctgtcgattttgtccgccaaatattagacaaaccattagacagtgaattagaccctgggtcgcgtcagcgtgttagctcaccaacgcgcgcgcgcgcggcggccgagccgccgaagccaaagaaacccataccaccaacgcctgaaccagcagcccccgcttcagacagtcctgtgtcagcgcacgctgatgaggctgccgagttggcgtggcggttcgtggggtggtgtcctcagctggtaggggcaccgaagaaggtgcgtggccagctccgtcagctggtcgctgccgagatccgccggaatccgggctggctggatgcgccagcgttggaggttgttgcccagcgggtacgtgctgaaggtgcgctgggggtccagcactgcgagattgtgcgagccgagctgcacggggtgatcgccgaccagaaggccgcccccgcccgccccgacgccctgcacgcgcgggagcccaagtggtgggacgacgtgtactacgaaggaaacacaaccgtgtggtacgactctgacgaaaccagtgacgacgacgaggcgtggaaccggtcgcaggtatgtcatgttgctgagcgtgacgacatggctggcgggattgctaccaacctgctggcctcccacgctgatgatccgatggcctggctgactcgccgtcaaaccatgctgatggctcgtttcccccacgcccagaacgaggtcatcgcgatgtgccacatcgtgcgcaccgccctggaggccgacatggccgccggaacccggtgggaggactgatgagggtctcccggcgcgccctcatggccgtggcccgtgccgacgctgccgcagcagaccatgccaccggccgatgggtggtcacagccaacgccaccgtcgcccggctgaccggactgtgcgaacgcaccgtccaatacgcccgcgccaccctggtccacctgggcctgtgccgcgtcgtggccaccggccgctacctcaccgccgacgagcggcgcacggctgctcgcacccatggcggccgccagatgcgcgccgcctccacccgcgtcctcaccatgtcctgcgcaatcgtttgcgccctaccccgaaggggtcaccactacaggaaagttaagttcctagatggtcaccaacgcacgcgcaggcgcgtgcgaaggccagcaacaccagagaagaaacccctgtggctgcaaaaactcgcagccctcctcgaccagcacctgccctggctggtgagaaaccatcacatcggccgactgtgccacgccctcaccgccctgggcatcgacgaacactggcaacccgcagacctcgacgccctcctcgacgccctcctcgacgccatgaaccgcaggaaccgtcgcctcggcctcgacgtgccatgcgccgacgaccagcacaaccccttgggactgttcatccaccaggcccgagacaccctcacccacgacaacccccatgaacgccgcctggcccgcgaacaccaccgcgcccaactcatcgacgaccaactccgccgccgcgcagaaaccgccacctgcgcagcccgcctcgcagccgagcacgccgaccccgactaccagacccgccgtcgtgaacgcagggaaaccctgcgagccacactcagggccgcccagcagcatgtcaggacacactgatacccgctcatacacacaccatgaaacacgacaagccacctgacagtatcagctgcaagacgcatgacaacatagaaggacatgatgaaatacacatagacacaaccccgcacagcagtttcgcaacaaatcatgatagtctcatggcagtatcgcttgatacacacatagcatcactcccacataggcagttatgctgatatactcctactaggttatccgtccaacatgctgagtgggttcctgtacagcatgaaaggagcatggcatgatatgggccgttctcaactgcaagggtggtgtcggcaagacgaccagtgccctcctgctggcggcagccgccgccaagcagggccacaccaccctggtggccgacgctgacccccagggcaccgcatcccagtggtcagccctggcaaccaaaaacgacgaacccctgcccttcccggtgcaagcggtcaacatcgccaccatggaggcactgcccaccaccaccgacgcccatgatctcatcctcgttgacacacccccctcggcaggcgatctgatgttccaggcatgccgcatcgccgacctcatcatcatccccaccgccacctccggacccgacatctcccgaacatgggtcaccatggacgccacacaaggcacaccacgcgcgatcctcctcacccaaaccgaacacaaccgtgtcgtctaccgccaagctcgcactgccctcgccgccgacgacaccgtcgttctcctggaccacgacatcccccgccgtgaatccatccgcacagcatggggcaccaaccccccagacgacgtcatcacctactacctgcccgtcctcaacgaactcatggaggccctgtcatgaccaccaagaaaaccgacccattcgcccgccagaaagcagcagaagaccgcgcccaccaactccaagacgaagcccaacgccacgcccaccccaaacgcgtcatcggccccaccgcacgattccagttcgtcctgccagccgacgtgctcaccggcctcaaacacctcgccctcacccgcggcaccaccgcccgccaactcaccctcgacgccctcgacaccgcctacggcctcgacaccctcgccaacagcgggaagaaaacccacccatgacccgtgggtccccctgccaccaccccctcgacggcaactgtgtgcgagccacaggcccgcacacaggcggcagcccagtgccgtccccgccaggaaaggaactgaacttttctggagtgctggctccctatcaccccttatggtgctatcagatccagtagcgccagcccgagaggaaacccatgagctacatcgtccgcaccggaaatctagccggcacccccgagctgcgcgaggggtagccgacacggcggaccgtgcccctgacagtaagcggcactactggagacatcaccatgaccgctcagatcctcgccccgtgcaaccagaaggctgccgtcatcgaaggagccctgccatgaaccaacctaccccccacaaggccgacgagtcacagacgagcaacaccacgaggaagtggcggcacaaggtgtcgttctaccaagacccggccgacaccgaccgagtccgcggagcgatcctccacaccatgacaaccgaaggcaaccggaacctgagccagttcgtcaacgatgccgtcatggccaaggtgaccgaactggaagcaaaatacaaccacggcgagccattccccgccgtgggagcccgaggactcccccagggcggcgcagccgccaacagataagagggcggggaccaccaatagcagtcgatttcggatccagatcgggtagacaggacccatgatgaatttcatatcctccctgctctcggccatcctgactctctttgcgatggtagccgtggcgataggagtggtgaacattgtgccgggaatatgcgccatcatcggtgcacggaaatacggcgaccaggaccgtgtgcgggcaggacaacgaaagatccttcttggtgctatcgccttggtggtagcagtaggcattcacccgtgacccacggttaccggaagccccgccgcaatcgataccactgtcagtaccatcaggggcgataggggtcaagctctccttgtcacaatcccttccccggcagcccagtaaccgtcgcttacagccatacatggatatgcgcccattcgtcggcaccgacgccgtgcgggttggcgacgctgacccgtctgctcacaaacgacccttccagcccagcaccacccactacaccgacacgatccacgaagctgaaaccgaacctcccatccccgtccgaaacatcaacgaactcatcaaccccaccaaccatgcatgaacgcacgatcgcctaccggccagccttcctgcgcgacgtgaagcggctcaaaaacaagcactacaacatgaacacacactcaaatgggcggtaaggtcacgaagtcgacgtggctgcctcacggatggcttcggcgagctcttggggtcgactccacatgggccagtggccggttggcagatccatcgcggtgaagttggtcaggtgcgcgacggcgctgaacatcggattgcctgctgcggccagctcgaggacctggacgctgggaatggagcagcagatcaacgtggttagtacatcatggcgagcgctattggacagcgcgacccgtgcccgggccacttgcgcgggttcaggaaccgcccgtgcccggaaccggtcaaggtgctcgttgctgaggccctctaaactggcctgcttgccgagagtatcgaagtcaggaagtggcagctcagctgtttcctcaggtagatctggtgcgaaggcacctccatcgctcatgggaccggagtccacccagacgatccgatggaccaactctgggtgcctgtctacaactaggctcaccggcccgttcgcgccactgtgtcccaccaggaccgcatcgccgcccatctcgtccaggatggctgagatggcgtcagcttggtcgtcgagcgtgcgcgtagtgcgctgggtgtcctccggatcgaggccaggcagcgtcagccccacggctcgactgccagcagtgttcaataactcgactacctcgtcccaagcccaggctccgagccagtaaccaggaacgaggacgataggccgatgctggtcaggtcgcgatgttgaagtcatggagacatagttgcacagtgcgcggacaagggagtggcactatttctggcatgaatttagatctgggtgtccggtgaggcgatcagaacgcctccatgtactgtccgagtgtctacgatgcagcggacacagtcgagcagctggctcacaagtttccaggtgtccttctgcccctatgagggaagtcggctgctctcgcaacctttgagggctgctctggggtcggaaccagttacagatcgttcaagttccgggaactaccgccggtcacgctgattgattcccgggcgatctcgcttctgacgacagtggtcggtaaccgagaggcgtcctactctgaccccgctgctgcggtgagtaaatcacgggcgtcccggatccggccacccgtccaagtgccagccagcttgatcggctaggcatcgtcaaggagcgacgatgaggtgatgatgcgatgtgagcgcaccgcgaagtgaggtataaagaagccttcccgggcgcatgcgtcgcccaggaaggccaggttggcccctggacggctgaatggttgggcggatcaggctgtagcggagacgtgcagtacctcgtaggcgatggcgttggttggggtctggtctgcatcgtggctactgagttcgacgaggatgacggtccaggtggtgatgtcgacggcggtgacgcgggcgatggtggaatcagtggatgctgcaaggaagtcggcggttatgtcttcgatgcagtgggacggagcagtgctggtgggcaggggcacggtcttgacggtcaggcttcgggcagcagagtaatcggcggttccgttaacaagctggtggacggtccagtcctggatcgggtgccggccgaagtcgcgtacgatagccgagtaaccaagttcgccccagcagaactggcgcatcccctctatgtcgcgccagacgtagaagggcgcgtaggagttctggggtgcgcctttgaccttttcttggatgaggtaggccttgaactccagtccatggtagccgtccatgaggtgtccagtctggatgacgcggtcgcggatgatctgcatgtcatagtcggtgggcagggtgatctgatattgcatggcgtacatcagcggttctccttggtttcgtgggagtaggtcgtgggggtgacgggttcctgccaatcgatggttgacaagtcgtcggcggcttgttggtaggtaaggtggatcattggctgtttgagtgcagcgccatgccagtgtctctggccggcgtcgatccagatggattcgcccttggtcaggtgctggggtgcttgtccttcaatatggaccagggcaacgccgcccgtgacgtagaggccctgtcccttggggtgtgtgcctcagcggcaaacgtgacggcgtgggcggcacgcccggcgtcttccgtggcacgatcggccggatccatggcggcgcgcagctgctgttctgcagccaggcgtccaggtcacggcgggcagcatcgacacccagggcagcctcgacggcttcagggctacgacgctggccgggctggttgaccgcagaccactggtgccgggcgtcgtccagatcatggccggcggcgtcgatgagggcggtggtggcttcggcgcagcatcgcctgatccactccgaacgtgacaggccagctgtctcggcggcactgtcaatgcgcgccaggagagatttcatgggcgctcatctgtagcctccagataggcgttgatgtagcgcagagcctgatccgtcatgtcgatggcggctgcctcggcagacgacacaacgggctgtggatgataagaccacccaacatagacggcgaacatcaatttctcgacagctttcatgaggtccccggcggcaaccgcatccgcctcatcatccgaggagaaccacttcaggtctgaacggctgtacatagcccctaggtcctgatgtgggtcgaggtccttg

SEQ ID NO: 234 - DNA, 6142 bp, Propionibacterium acnes
  source 1..6142: mol_type = genomic DNA
atctgctgacagcataacgggcctgcccttgaagggttggactctgcacccatttcagccgggtacgttgccggctgggcgaaggaagcagacggcgccgcgattgaagctgccgccgagcacgtcgcgaagacctcccacgcgattgccgaggcgttgcagctcaccgcacagtgagccccacggggcgaccggctcaccccggtcgcccctcaccccccgacaggggaaccgttcccgccgcctgaatctccatacccctgatacgtactacgcggggtcgaggagtggactcccccaccctcgtgtagtacactatactacacagtcattgaggatagaggtgacgtcatgagtttttcgatccgtttaaccgaccatgagcgccgcttagctgattcctacgcccgcctgcactcgcagtccctgagtgaggctttcaagcaagccctcttcgaccgcatcgccgacgagttcgatctgcaagtagcccgtgaggcactcaccgactacgcccgcgacaactaccagtctcgccccatcagcgagctatgggacgagtgtgacctatgagctggcagatcgaaaccacgagccggttcgataaagaattcaaaaagctagaccgctacacccaaaaactcattcacggctggatcacgaaaaacatcgacaacaccgacgatccccgccgccacggcaagcccctcaccggtgatctttccggactgtggcgctaccgcatcggcgactaccgcctcatctgcacactcaacgataaccgcctcaccatcctcgccctgtccatcggtcaccgccgcgacatctaccgataagccgttgcaagactgcggcgtcgacaccgccgggaccctggcccaggccttgggcctggaggaggacgagagcgaggagcacgccgcctgagcggtcgccggcacttcccataacagcaccggtcccggcggcccggccccgcgtctggtgctcggaccgatgccggcgcctggcctccgacgcccgccggggccagcggctgggctacctcgacgtcgacgtacaacgggccgaacgaaccgtgcgctgatttaccaccgcttccgcacagagaacatgcctctgactaggagaaatgacgttttccacagggcctctattactaatatccctattatctctatccacgcgcgcgagcctcagcgttcaagcttcaggtcttgctcgtctccctcgcgcctcgctgcgctcgttgctactgccgccccacccggcaagccgggtgggttgccatcggaataccgtggaccatcccggcgcatacacccagacggtccaagatccaatccacgctcacccgcgacgccgctaacgatcctcatacaccgtagatgccgttctgagagccttccagacccgcacgtgggtttattgcaccgagacccaaatcccctcagaagcgatcctgaaaccgtctacgccccatttccgacggacgctggacaggctgggcggcttgtctcccgccgcagacatggccctggcatatgcggttgccgactggtgggatcagggattggatcacacggcagacggctggtccaaggcgggtgtgcaggtgcggtgagcggcagacgtgaccggtggggtgcactgtcatggccgggcatctgccgagccaccatgcgggccctggaccaggaggcagcccgctgcgaggactgggggaagacggcggcacggatgggccgtcgggatgcggcggccggattcaccgagactgcggtgcagcatcgtggacagatgcaccacctcatgtcggcacaaaaagtgtgggtgtcgaccgacatggtgtcggctacactggacgccgcaggagacgtgccgagtttcgaggccgtcgacgtccctgccgccgggctcatgggtttggccagccccctgccgccggttaccctgcagcatccgctgtatctgcgcagcgacgagggtgtgacaaccttcactgatccggttctcgtcgacgcgctgggatggtggatggattctgggcgtgtgcacgtggtgatgtgcacacgcacaccccggctgcccaacccggtttatgcggtggcctccccactgacggtggtggagaaaatcacggtgcccaccggcatcgagttcgagaccatggagtccaggatcctgacccccggcggcgtgacaggcgtctcacggcagggcacacgcatgatgatccggttggcgtcatggctgggtgccgcgtgggtgctcatggcgactccgacggtgtcggagccgcaccctatggatggccggtggggaggcccagcaacggggcagacccggccgcgtgatcgggtgaccgtggtcgacatgcggcccatgaggcaggtgcacaccaccaccgaccccaccggcaggcggttgacgacccggcatgtcgtgcgaggacactggacacaccaaccctacggcccggcccgcagtctccgacgcctgcagtgggtcgccccattcatccgcggccccgaaggggctccgttcgtcggcaccgacaccgtcaccgtatggcgccgctagatacgcgggcgcggggggttgacgaacgatgcccccctctttgtgttgtgatcagtcgtgatcggcgggttttaggtcggggtaggtgtcgagaatggccttgaggacgaggtcttggattgtggtgtcattctgggctgccttgaccttcagtccaacgccgatgtcccgggggattctggtctgcaacttgaacaggtctgcctccttggttttgaacagtttggctgcagggttggcaacgggctgttcttggcgctggcgtccaaggttgcttttctttcgggcggtcatgacatcatctccaacagttcgtcggcaacatcggcgaagaaggcgatagtttccggctcaggggtacagccgtaggcgcgcttgatgacttgacgcttggggatgacgtgatcgaccaactgcgtctgggagtcgttggctagaaggtcgcgaccttccttgaacagggaggtattcggttcagctttggaaagcagcaccacgcgcggggttcctgcggcggcgtcgtgcgtctcccaggtgcgcgccatgtcgagcccggacgtgtcggtggggatgataaccagatcggcggcgcgaatggcggcggtgatgatgtcaccgttgcccggcggggtgtcaatgatgacaacttcttcgggtccggcgacgaggtgctggagcgtcgccttgttggccggttccacggggaaccccaaggggtcggcgttactcagtgtgcactcggcccaggatgatgctgacccttgagggtcggcatctttgacgcggaccatacggcccgtctcatggagagctgcagccagcaggatcgctgccgtggtcttaccgacgccacccttggcgttgataatgctccagatcatggtgacacctttcagtgaggatgcatatcagtttacctgcaaggagtaaagacggcaagcagttatgccgtttctgcggcaagccgtcttgcatccttggatgtatagatagttgtctacttatggttgtggatcgtggtgtctcgtaccaggatttagtgtgctcgctgatatgcacgactttcgggcggcctgatctggcggtggtgccactaacccaggagtctgatccgcaaggtgtcctcgactttgaggaaggggtctctgctttcgtgttgacctaaagtcaacggccctgggcgatcactgaatcctaataactttgtatccttccctgattgcatcttagcatccttgaattcaaacagggatggagccatgctgttttgacgacatggatgcactggggtttggttgttgccgatgcggagcgtcaggcggcccgggacgccgccaccgccgacacgctgcgggagatcgtgggactgctgggccggggcggcgaggtcccgcccgccaagacggggcgtaagacgaccggcaggccggccccggcccgcaagtcgtcggccacgcagtaaaggcagggatccgtccctacgcagagagcggaggcagatcctgggggatccgactcttcggttccgtgatcttcccggagatcttcccggatcccccagggctcatcctgatacggggtccgccgacggaccccgtatcagtgggggcgctgccaccagtgatggcgggcgggtcggtcggcgtctaggccccgcccgatggtcgcctggtctacctcgcaggcccgtgctgttgccgaggccgagaacgtctgcccacttgttgccgattcagtcccctctccgtctgccatgtcgccaacctttcctatctggcgtgctcatggacatgcccgggcacgccctcgctgctcagaggcctgctcgttccacctctggccgcgaaccgtatttctgctgaccactcctcgtgcgtgaatatttgccagccttggccattcatatttggactactctgcaccagatatcggactgggaaacctcttgcacatctctaattgtcatctattcgttgggcgcgcgctgttagatcgtgatcataccaatcagaagacaaagcgacgcccttttgagcggcttttcgaacgattctagaccgcgctatatcagcatttctaccgcgcggccagagtgctacactaaattcctctctgcaatccttaagtccattctttacttcctcatccaatttctgcgacagcatttttatggaagcatcgcactctgactcatcatcaaatgcctcaattgcgtgcgttcgccattcacggcgcgtattatcgtagccgtaatgaagtattacccaccgatccacagaatcatcgttaggatctacaactgtcatgaatggcccaactctcgctctggtgtattctcaattgcagttcagtgactttacttgaccagtcccggatttagtagacgtagacggagagtaccccgccgggaacttgactgacatcactgctgtaccgtactgctttcccgggtggcaaccatcgtaagcagcatttgccgtgacgtacctagtgctctttctctgagtgccggtaatcgccttatatggtacaggtgggtgaatcgtagccgttacggctaccgatgacacgtttgcatcacatgaagctgtggcgacataattagttgtcccattgacatgatgagagtcgtggacatactgtcgaggatcgagagtgcaggttattgttgacgccgttgttctggtaccagctgctttcgagctctttgttgcagttacagtctgcggccctgaaggttttactgacgcgactgatgtgttcgcgtgttttgcggcagtgctttgatttggttgtgcttgtgtagcagttgctgatgtcgccagtgatgcccccattaccatagctgtgattatggcgtagtctttacgcttcattgcgcccccaaataagcatgttagtttgctattttgaataggatacgagacatcgccatgacttgtcaagggcagaagtagaaagaatcggggggtatcaagaaagatgtgctttcatcaggacgaaagcggatgggtccgttcgacttggtgacgaatgatccggccttgcgtcgcggagaccaggccggcgagtttgtcgagcagggccgccgtggcctcatcgtcgggcacatcactaaagggacgaacaaccatgacggctagggccagaaacgaccggaactgaatcgcatgtggacccccatctggcaccaggcacacacctaccgaccggaaaccctgcaccctgtcgctcccagttcacctcctaatatgcgcctatagtctgtgctagtagacattattttgtgtgttgtttcccatctggcatgtctggccccggacccgccgcgacacgcggtggtggataacagaccaggacccccggaccatagagaccagggggacgagacagtcccccggtgaggatgtctcgatgtgcagatcaggaacagaatcgccgggcacgacccggcgccggtgccggtgcagtgaacccgtggcccatcgactccacgaacgaacgtctcgccttcctcaactggtgttggcggcaaggctactcagcagccatcgtggaa

SEQ ID NO: 235 - DNA, 5731 bp, Propionibacterium acnes
  source 1..5731: mol_type = genomic DNA
tgcgctgatttaccaccgcttccgcacagagaacatgcctctgactaggagaaatgacgttttccacagggcctctattactaatatccctattatctctatccacgcgcgcgagcctcagcgttcaagcttcaggtcttgctcgtctccctcgcgcctcgctgcgctcgttgctactgccgccccacccggcaagccgggtgggttgccatcggaataccgtggaccatcccggcgcatacacccagacggtccaagatccaatccacgctcacccgcgacgccgctaacgatcctcatacaccgtagatgccgttctgagagccttccagacccgcacgtgggtttattgcaccgagacccaaatcccctcagaagcgatcctgaaaccgtctacgccccatttccgacggacgctggacaggctgggcggcttgtctcccgccgcagacatggccctggcatatgcggttgccgactggtgggatcagggattggatcacacggcagacggctggtccaaggcgggtgtgcaggtgcggtgagcggcagacgtgaccggtggggtgcactgtcatggccgggcatctgccgagccaccatgcgggccctggaccaggaggcagcccgctgcgaggactgggggaagacggcggcacggatgggccgtcgggatgcggcggccgaattcaccgagactgcggtgcagcatcgtggacagatgcaccacctcatgtcggcacaaaaagtgtgggtgtcgaccgacatggtgtcggctacactggacgccgcaggagacgtgccgagtttcgaggccgtcgacgtccctgccgccgggctcatgggtttggccagccccctgccgccggttaccctgcagcatccgctgtatctgcgcagcgacgagggtgtgacaaccttcactgatccggttctcgtcgacgcgctgggatggtggatggattctgggcgtgtgcacgtggtgatgtgcacacgcacaccccggctgcccaacccggtttatgcggtggcctccccactgacggtggtggagaaaatcacggtgcccaccggcatcgagttcgagaccatggagtccaggatcctgacccccggcggcgtgacaggcgtctcacggcagggcacacgcatgatgatccggttggcgtcatggctgggtgccgcgtgggtgctcatggcgactccgacggtgtcggagccgcaccctatggatggccggtggggaggcccagcaacggggcagacccggccgcgtgatcgggtgaccgtggtcgacatgcggcccatgaggcaggtgcacaccaccaccgaccccaccggcaggcggttgacgacccggcatgtcgtgcgaggacactggacacaccaaccctacggcccggcccgcagtctccgacgcctgcagtgggtcgccccattcatccgcggccccgaaggggctccgttcgtcggcaccgacaccgtcaccgtatggcgccgctagatacgcgggcgcggggggttgacgaacgatgcccccctctttgtgttgtgatcagtcgtgatcggcgggttttaggtcggggtaggtgtcgagaatggccttgaggacgaggtcttggattgtggtgtcattctgggctgccttgaccttcagtccaacgccgatgtcccgggggattctggtctgcaacttgaacaggtctgcctccttggttttgaacagtttggctgcagggttggcaacgggctgttcttggcgctggcgtccaaggttgcttttctttcgggcggtcatgacatcatctccaacagttcgtcggcaacatcggcgaagaaggcgatagtttccggctcaggggtacagccgtaggcgcgcttgatgacttgacgcttggggatgacgtgatcgaccaactgcgtctgggagtcgttggctagaaggtcgcgaccttccttgaacagggaggtattcggttcagctttggaaagcagcaccacgcgcggggttcctgcggcggcgtcgtgcgtctcccaggtgcgcgccatgtcgagcccggacgtgtcggtggggatgataaccagatcggcggcgcgaatggcggcggtgatgatgtcaccgttgcccggcggggtgtcaatgatgacaacttcttcgggtccggcgacgaggtgctggagcgtcgccttgttggccggttccacggggaaccccaaggggtcggcgttactcagtgtgcactcggcccaggatgatgctgacccttgagggtcggcatctttgacgcggaccatacggcccgtctcatggagagctgcagccagcaggatcgctgccgtggtcttaccgacgccacccttggcgttgataatgctccagatcatggtgacacctttcagtgaggatgcatatcagtttacctgcaaggagtaaagacggcaagcagttatgccgtttctgcggcaagccgtcttgcatccttggatgtatagatagttgtctacttatggttgtggatcgtggtgtctcgtaccaggatttagtgtgctcgctgatatgcacgactttcgggcggcctgatctggcggtggtgccactaacccaggagtctgatccgcaaggtgtcctcgactttgaggaaggggtctctgctttcgtgttgacctaaagtcaacggccctgggcgatcactgaatcctaataactttgtatccttccctgattgcatcttagcatccttgaattcaaacagggatggagccatgctgttttgacgacatggatgcactggggtttggttgttgccgatgcggagcgtcaggcggcccgggacgccgccaccgccgacacgctgcgggagatcgtgggactgctgggccggggcggcgaggtcccgcccgccaagacggggcgtaagacgaccggcaggccggccccggcccgcaagtcgtcggccacgcagtaaaggcagggatccgtccctacgcagagagcggaggcagatcctgggggatccgactcttcggttccgtgatcttcccggagatcttcccggatcccccagggctcatcctgatacggggtccgccgacggaccccgtatcagtgggggcgctgccaccagtgatggcgggcgggtcggtcggcgtctaggccccgcccgatggtcgcctggtctacctcgcaggcccgtgctgttgccgaggccgagaacgtctgcccacttgttgccgattcagtcccctctccgtctgccatgtcgccaacctttcctatctggcgtgctcatggacatgcccgggcacgccctcgctgctcagaggcctgctcgttccacctctggccgcgaaccgtatttctgctgaccactcctcgtgcgtgaatatttgccagccttggccattcatatttggactactctgcaccagatatcggactgggaaacctcttgcacatctctaattgtcatctattcgttgggcgcgcgctgttagatcgtgatcataccaatcagaagacaaagcgacgcccttttgagcggcttttcgaacgattctagaccgcgctatatcagcatttctaccgcgcggccagagtgctacactaaattcctctctgcaatccttaagtccattctttacttcctcatccaatttctgcgacagcatttttatggaagcatcgcactctgactcatcatcaaatgcctcaattgcgtgcgttcgccattcacggcgcgtattatcgtagccgtaatgaagtattacccaccgatccacagaatcatcgttaggatctacaactgtcatgaatggcccaactctcgctctggtgtattctcaattgcagttcagtgactttacttgaccagtcccggatttagtagacgtagacggagagtaccccgccgggaacttgactgacatcactgctgtaccgtactgctttcccgggtggcaaccatcgtaagcagcatttgccgtgacgtacctagtgctctttctctgagtgccggtaatcgccttatatggtacaggtgggtgaatcgtagccgttacggctaccgatgacacgtttgcatcacatgaagctgtggcgacataattagttgtcccattgacatgatgagagtcgtggacatactgtcgaggatcgagagtgcaggttattgttgacgccgttgttctggtaccagctgctttcgagctctttgttgcagttacagtctgcggccctgaaggttttactgacgcgactgatgtgttcgcgtgttttgcggcagtgctttgatttggttgtgcttgtgtagcagttgctgatgtcgccagtgatgcccccattaccatagctgtgattatggcgtagtctttacgcttcattgcgcccccaaataagcatgttagtttgctattttgaataggatacgagacatcgccatgacttgtcaagggcagaagtagaaagaatcggggggtatcaagaaagatgtgctttcatcaggacgaaagcggatgggtccgttcgacttggtaacgaatgatccggccttgcgtcgcggagaccaggccggcgagtttgtcgagcagggccgccgtggcctcatcgtcgggcacatcactaaagggacgaacaaccatgacggctagggccagaaacgaccggaactgaatcgcatgtggacccccatctggcaccaggcacacacctaccgaccggaaaccctgcaccctgtcgctcccagttcacctcctaatatgcgcctatagtctgtgctagtagacattattttgtgtgttgtttcccatctggcatgtctggccccggacccgccgcgacacgcggtggtggataacagaccaggacccccggaccatagagaccagggggacgagacagtcccccggtgaggatgtctcgatgtgcagatcaggaacagaatcgccgggcacgacccggcgccggtgccggtgcagtgaacccgtggcccatcgactccacgaacgaacgtctcgccttcctcaactggtgttggcggcaaggctactcagcagccatcgtggaaacgatggacgccgcgggagcctacgaccacctcgacgacgaccagaccagcaaccagcacgactaacgccgctcccagcacgggggaaggcggcgcaccaggtgcgccgccttcccccgtgctggtgtctcgtcggcttactggtgggggtcgtaggggaacccgtaggtgtgttccagggccttgcggagaaggtcgttcatagttgtgtgttcggcgacggccttcatcttcagcgccgtgtgggtggcggtgggtagcttgacgttgaacgcggtgatcggggtcttggccgactggaaggtttcagagacactggctccctggctggccgccatttggtcggcgtaacggctggctttgtcggcggcggtgggtttgcggttcttactcacttcagcatctccttgattcggtcggcaacctgggcgaactctcctagatctgttggccgggttccgatggcttgccgataggcgacccgtcgatgaacctccgcatcgagaacgtctaggccctcaacggcggcggccccctcgtgggcatcacggtattgcctggtccaatcggctttgttgaagagcagggcccggcgtgtgccgtgggccacctggtaggtcattagcgctcggtccatgtccaggtcccccgactcggtcgggatgatg

SEQ ID NO: 236 - DNA, 5381 bp, Propionibacterium acnes
  source 1..5381: mol_type = genomic DNA
cacccacgacaacccccatgaacgccgcctagcccgtgacgctgaacgcgcccggctcatcgacgaccaactccgccgccgcgcagaaaccgccacctgcgcagcccgcctcgcagccgagcacgccgaccccgactaccagacccgccgtcgtgaacgcagggaaaccctgcgagccacactcagggccgcccagcagcatgtcaggacacactgatacccgctcatacgcacaccatgaaacacgacaagccacctgacagtatcagctgcaagacgcatgacaacatagaaggacatgatgaaatacacatagacacaaccccgcacagcagtttcgcaacaaatcatgatagtctcatggcagtatcgcttgatacacacatagcatcactcccacataggcagttatgctgatatactcctactaggttatccgtccaacatgctgagtgggttcctgtacagcatgaaaggagcatggcatgatatgggccgttctcaactgcaagggtggtgtcggcaagacgaccagtgccctcctgctggcggcagccgccgccaagcagggccacaccaccctggtggccgacgctgacccccagggcaccgcatcccagtggtcagccctggcaaccaaaaacgacgaacccctgcccttcccggtgcaagcggtcaacatcgccaccatggaggcactgcccaccaccaccgacgcccatgatctcatcctcgttgacacacccccctcggcaggcgatctgatgttccaggcatgccgcatcgccgacctcatcatcatccccaccgccacctccggacccgacatctcccgaacatgggtcaccatggacgccacacaaggcacaccacgcgcgatcctcctcacccaaaccgaacacaaccgtgtcgtctaccgccaagctcgcactgccctcgccgccgacgacaccgtcgttctcctggaccacgacatcccccgccgtgaatccatccgcacagcatggggcaccaaccccccagacgacgtcatcacctactacctgcccgtcctcaacgaactcatggaggccctgtcatgaccaccaagaaaaccgacccattcgcccgccagaaagcagcagaagaccgcgcccaccaactccaagacgaagcccaacgccacgcccaccccaaacgcgtcatcggccccaccgcacgattccagttcgtcctgccagccgacgtgctcaccggcctcaaacacctcgccctcacccgcggcaccaccgcccgccaactcaccctcgacgccctcgacaccgcctacggcctcgacaccctcgccaacagcgggaagaaaacccacccatgacccgtgggtccccctgtcaccaccccctcgacggcaactgtgtgcgagccacaggcccgcacacaggcggcagcccagtgccgtccccgccaggaaaggaactgaacttttctggagtgctggctccctatcaccccttatggtgctatcagatccagtagcgccagcccgagaggaaacccatgagctacatcgtccgcaccggaaatctagccggcacccccgagctgcgcgaggggtagccgacacggcggaccgtgcccctgacagtaagcggcactactggagacatcaccatgaccgctcagatcctcgccccgtgcaaccagaaggctgccgtcatcgaaggagccctgccatgaaccaacctaccccccacaaggccgacgagtcacagacgagcaacaccacgaggaagtggcggcacaaggtgtcgttctaccaagacccggccgacaccgaccgagtccgcggagcgatcctccacaccatgacaaccgaaggcaaccggaacctgagccagttcgtcaacgatgccgtcatggccaaggtgaccgaactggaagcaaaatacaaccacggcgagccattccccgccgtgggagcccgaggactcccccagggcggcgcagccgccaacagataagagggcggggaccaccaatagcagtcgatttcggatccagatcgggtagacaggacccatgatgaatttcatatcctccctgctctcggccatcctgaccctctttgcgatggtagccgtggcgataggagtggtgaacattgtgccgggaatatgcgccatcatcggtgcacggaaatacggcgaccaggaccgtgtgcgggcaggacaacgaaagatccttcttggtgctatcgccttggtggtagcagtaggcattcacccgtgacccacggttaccggaagccccgccgcaatcgataccactgtcagtaccatcaggggcgataggggtcaagctctccttgtcacaatcccttccccggcagcccagtaaccgtcgcttacagccatacatggatatgcgcccattcgtcggcaccgacgccgtgcgggttggcgacgctgacccgtctgctcacaaacgacccttccagcccagcaccacccactacaccgacacgatccacgaagctgaaaccgaacctcccatccccgtccgaaacatcaacgaactcatcaaccccaccaaccatgcatgaacgcacgatcgcctaccggccagccttcctgcgcgacgtgaagcggctcaaaaacaagcactacaacatgaacacacactcaaatgggcggtaaggtcacgaagtcgacgtggctgcctcacggatggcttcggcgagctcttggggtcgactccacatgggccagtggccggttggcagatccatcgcggtgaagttggtcaggtgcgcgacggcgctgaacatcggattgcctgctgcggccagctcgaggacctggacgctgggaatggagcagcagatcaacgtggttagtacatcatggcgagcgctattggacagcgcgacccgtgcccgggccacttgcgcgggttcaggaaccgcccgtgcccggaaccggtcaaggtgctcgttgctgaggccctctaaactggcctgcttgccgagagtatcgaagtcaggaagtggcagctcagctgtttcctcaggtagatctggtgcgaaggcacctccatcgctcatgggaccggagtccacccagacgatccgatggaccaactctgggtgcctgtctacaactaggctcaccggcccgttcgcgccactgtgtcccaccaggaccgcatcgccgcccatctcgtccaggatggctgagatggcgtcagcttggtcgtcgagcgtgcgcgtagtgcgctgggtgtcctccggatcgaggccaggcagcgtcagccccacggctcgactgccagcagtgttcaataactcgactacctcgtcccaagcccaggctccgagccagtaaccaggaacgaggacgataggccgatgctggtcaggtcgcgatgttgaagtcatggagacatagttgcacagtgcgcggacaagggagtggcactatttctggcatgaatttagatctgggtgtccggtgaggcgatcagaacgcctccatgtactgtccgagtgtctacgatgcagcggacacagtcgagcagctggctcacaagtttccaggtgtccttctgcccctatgagggaagtcggctgctctcgcaacctttgagggctgctctggggtcggaaccagttacagatcgttcaagttccgggaactaccgccggtcacgctgattgattcccgggcgatctcgcttctgacgacagtggtcggtaaccgagaggcgtcctactctgaccccgctgctgcggtgagtaaatcacgggcgtcccggatccggccacccgtccaagtgccagccagcttgatcggctaggcatcgtcaaggagcgacgatgaggtgatgatgcgatgtgagcgcaccgcgaagtgaggtataaagaagccttcccgggcgcatgcgtcgcccaggaaggccaggttggcccctggacggctgaatggttgggcggatcaggctgtagcggagacgtgcagtacctcgtaggcgatggcgttggttgggctctggtctgcatcgtggctactgagttcgacgaggatgacggtccaggtggtgatgtcgacggcggtgacgcgggcgatggtggaatcagtggatgctgcaaggaagtcggcggttatgtcttcgatgcagtgggacggagcagtgctggtgggcaggggcacggtcttgacggtcaggcttcgggcagcagagtaatcggcggttccgttaacaagctggtggacggtccagtcctggatcgggtgccggccgaagtcgcgtacgatagccgagtaaccaagttcgccccagcagaactggcgcatcccctctatgtcgcgccagacgtagaagggcgcgtaggagttctggggtgcgcctttgaccttttcttggatgaggtaggccttgaactccagtccatggtagccgtccatgaggtgtccagtctggatgacgcggtcgcggatgatctgcatgtcatagtcggtgggcagggtgatctgatattgcatggcgtacatcagcggttctccttggtttcgtgggagtaggtcgtggggatgacgggttcctgccaatcgatggttgacaagtcgtcggcggcttgttggtaggtaaggtggatcattggctgtttgagtgcagcgccatgccagtgtctctggccggcgtcgatccagatggattcgcccttggtcaggtgctggggtgcttgtccttcaatatggaccagggcaacgccgcccgtgacgtagaggccctgtcccttggggtgtgtgcctcagcggcaaacgtgacggcgtgggcggcacgcccggcgtcttccgtggcacgatcggccggatccatggcggcgcgcagctgctgttctgcagccaggcgtccaggtcacggcgggcagcatcgacacccagggcagcctcgacggcttcagggctacgacgctggccgggctggttgaccgcagaccactggtgccgggcgtcgtccagatcatggccggcggcgtcgatgagggcggtggtggcttcggcgcagcatcgcctgatccactccgaacgtgacaggccagctgtctcggcggcactgtcaatgcgcgccaggagagatttcatgggcgctcatctgtagcctccagataggcgttgatgtagcgcagagcctgatccgtcatgtcgatggcggctgcctcggcagacgacacaacgggctgtggatgataagaccacccaacatagacggcgaacatcaatttctcgacagctttcatgaggtccccggcggcaaccgcatccgcctcatcatccgaggagaaccacttcaggtctgaacggctgtacatagcccctaggtcctgatgtgggtcgaggtcc

SEQ ID NO: 237 - DNA, 5561 bp, Propionibacterium acnes
  source 1..5561: mol_type = genomic DNA
gggatgaggatgacggccgcgccgacacttcggagcgaggtcatgtgacgatccttcggtagctcgacgggttgccgtagatcttttccacgttgatgccgctgtgggggttgtcggcgctaaccatttggcctccaccgatgtagacggccacgtggtgggcagggtttccccagaggatgaggtcgccgactttgagctggtcacgggccaccgcggtgccgacgtgctgttgttcggcggcggtgcggggaaggctaatgccgatacgccggtacagcgccgaggtcaggcctgagcagtcgtagccgccatcggctttgccgttgccaccccacacgtaggcgtaggagttgttgtcggcgatcgatttggcccatgccacggcttcggccaggttcttcgacacaccggtctcgttagcggccccggtggcacagttgtttgacaggtgccctgtagtagtggatcccactatttgtttggccatggtttcccatttggcgtaggcatcgggcagggctgagccttgcactgcctgagctgcctgcgtcagcggcatcttctgccagtcagcgatgtcgactaaaccgggaatgtggaatccagggccgccggccgatccggggccagcgtaggtgatggtgtggcctttcaagaacgcctcggtggcgtaggcatcattgttgacctgatccagagtcccgtaccagcccggcaggatgcgctgctgaaaggggccggcgtcaccgtcaccgttagccttcgctgaggtagggtcggccccaagatctgattcttgtttggcggtcatgatagcgatgaccgctgcctgggtaggcagtttgtcacgctggaccacagtgacgatggtggtcacgagctgcttctgcctggccgtgaggcctccggcacccacagtgcctccggtgacggtacccacgcaagcatccccgccgacactgccaccgccgccgccagagttgtcgtcgagggccccagagcctactgacagcagcggcacaatgatcacggtcgcgggcaagaccgccaggcccgccagcatcagcactgctgcactcaccacggcgatcacgtgagatgctttcaacgctgcccacctctcgctggtttgagggggcgacgcctgctggtacgcacaggcttggttgatccagtccgccgttgattggcaggcctgggtttgatcggcttgctgggacccggtttgggctccggagtcttaggctccggcttcacatgcctaggcacttcggctgcggtgggaggagtcagcacgtggcgtactggcttggtgaccttctgggcacccgaaacaaccggcttagacaccaccttggcacctttgaccaccggtgcggctgccttcgcgccggccttcttgactgcacgatgcgctttgatagccccggcctcggcccggccaaccctactagcagtagcatcgaaggctctgtggcccgtcgttgccctcaccggtgcatccttgccctggcgggtctgcttagcgatcgccgacatgccgcctcgcaatgccgaaacacggttgtgggcgtgggcgatcgccgacataccggccgtcgtaattttcgactggccctgcggggcccctgccccagcacgaatctgccggtaagccgccgacgtgcgacgagcacccgccgccattcgcgccaccttcgcagccctagtcactcccgtcgacacgccacccgtggctaccgcagcagcacccgagaccacagtcgaggccatccgccttcgacccgatccagtgagcttgcgaccaccactgcgcaccatccggcgagcaccccgcccagcccactggccaatcgccgacgccccttcagagcgcttgctgcgcatccaatcgttgatcttgtccctcagccccttctcgcccttgtgacgacgccacatggacatcaagaacccgataatccccacgagctcgagcatgttgacaaccatgaccttgatggcgacatcaccgtcagaggcgaaaaccgacttgatgatgagcatgaccacacccaacatcaccatcgacccgacaatgccgatcatcgagtacaagatcgaacacagatcccggatgagcggatctgtgcggccagggatagcccgcaacacgttgagcatcgacatgaacgccgaccacaccaacttgcacacgtagaaccagcacatgcccgcgaacaccagcaggaccacagccaaacccgccaccgtcgacgagtaaaagaagaaccccaccaaccacgaaccatccgcaatatcgccggcgtaatccgacaacccctcatcacagtcaccaaggtcgtcgcgagcatccgagacgtcatcgtaagggccacccttgagcacctcgatgtacttgtcgtggcacttcgcatcaataatccggccatagttgagctgctgatgaaccggcgccacgaacgagtccacaatgatcgccgacagcttcggatccttcgagtctcccgtcgaggtcatgtcatcaggaatctcgacctcaccagcggtcgccgtcgcaggatcaaccgaactggtaatcatccgagacagcgccacgccgaactgctgggtgcgagccagcggagtagccaacgtcgtcgtatcgcctgcgaacttcgccactggggccgccaagaaacccaacgccagcgccgcagcaatcgccgcacgcgcacccgtagcccacgcccctgccgtacgtcccctcatcatcttgacgaccacgcccacaccggcgcacgtcgtcagcaacgtcaacaccgttccaccccagctgtccgctcccagcggggccaaaaccttgtcgtggatgtcgttctgtaaccccaccagcggtccggtaatccacccgacccagctcatcgccacggtccagtccaacaaccggcacagcaacgcaatgaccatcaggtacgtgttccaacacatgccaataatggaggcccacatactcttcagcggggccgtaacgccaccatcgtccatcgacatctggtactgaaacaagtgaataccgttggagtcagtcacattgaaaccgtcacccatccagcccagccccgggcccgatgccatggcaggcacactgctcagcgccaccaccaaaaccagcgtggtgacgatgatacgaaatcgccgctccccggccccggggcggcgtggatgacggctcacgctgtctcctggtcgtgctcgggcgggttggagctggcggcttcgcggtggggagcgtaggcaggtctcagtagtcgaatttcaccgacgttgccgtgttggtcggcgtacaggccacaaccggggcctccggggttgagggcaatcttgaccaggtcagcgaactcttcaggggacgtcttgggatctacgcccaggaactcgacacctttctgggcgaggttgatgttgtcgcacagcaacacgatgcgatgctgaatgaggttgcggacggtctcgttggggtaatcggcctcggggtcgtgggagccagtaatgagccaggcgttggctcggcgggattcgcgcacgtactcatcgatggcgtgggaggcttccggcgaggacgacatgtgatgaaactcgtcaacaatgaaagcggcgtcgcgggcccggtcgctgaagcacaccaggcgagccagacgggcaataagcgcgtagagggctcgaccaaacaccttgtgcgggggcagctgccgaaacaaatgttctgacagcatctcctcggcgttaggaagagcgatgccacaagtgccaatgatgaggatgtcggcactcaggtcggcgggaggaaggtccgggtcaaagatggccgaagctagggaggccgagttctcgatgtcagcgaacacggcaatcctgtcagcgatcgcggtggcctcgggaaggtcgcactcctcggccaggtggcgggccaaacgcccacacgaggtgatctggtggtcacgcatgtaggccggtttgaggaccttggccagcgtggtcccggccacaccgatggtctccaagttaagcaaggtcagcaagaacgactgggcgacctgcccggccatctccgggggaaggatgcgcagcgggtccagcgacagcttggggtgggccgtgtcgacgatctggcgtctaaccccgtcgatagagttgacaaaggttacccactcccgctcatcggagttgtcggtggcaataatgcgcccgccccgggccgcgatggctgcgcacagccgcttctcggccatcgtcttgcccgcgcccatcttgccgatgaacgccaccgtgttgcctttctgatcctgagtgtcggcatgcaaatcgaggtaggccagcgactgcaacggggagcctgtgaccacagccaacgggatgccggtggtacggcccaaccggtactcaaccaccgggatagatgcggcgaacgcggaggcgtgagtcagctgacggtaggcgttaagtgaggaggagaaccggccaccgggccgggcagcccacagcaagtcctcctgacggcccacgggacgcacccacgtgaagtcaccgaacaccggatcattgacgaacgctcctgccagctcctcggtggtctcaaagtcaggagacgagacagtgacggtgataagagcctggatctcgacctcacgctcatcggcggccagctcggcgttgtagtcgacgagcacctgagcggaatgctcgatagacatgagggtcgaagcctgggtcatctcaccgccctcaacattgtcgagctgatcgaccgtttgacggatagcccgctgatttttctgcatcgcagcgtgacgggtccgggccactccccggatcgccacgtcgaccggcacgccagtgtcgtcgatacggcccaggaactcgtaggcaggccacgtcatcgtgcggggcaccttacccagcacgatatgggactggtagacggtctcgccggtgtcggcaccgattttgaggacgcgacgattccacgcctgagccgtccgggacatgtgggagactcgcttgtcatcctcgctggccagcaggtcggaggtcgcggcctcatcgatgaccaactcccccagcgcggcacgtccaacctcatccatgagggcgattccctcgccaggggcatcatcacgcaaccgggtcgggtggcctgacaggtgctgccgaagccagatctgttcatcaacggtgaccgggcggggttggaacgctgccggcagtttcgcaccgaattccttagcctgacggagggcccactcccgtgcgacacggccaggagcggtggtcatgagtccggcggcttcggtgattttgttgagggcggcggtccaggcggtgtgggtgcgtattttctggtcttggttgagtttgatcgataggaaccacacgcgccggcctagggattcggtttcaggctggtcgagggtggcgtcgatttcgtcggcccacacggggtgttcgctcaggtcgaggccggcggccatggcgtcgacgatttctgtggggtcggtccaggtgagggctccgttgag

SEQ ID NO: 238 - DNA, 4899 bp, Propionibacterium acnes
  source 1..4899: mol_type = genomic DNA
gataccgcaaggctgtgtgggatcagctgttcgggatggggcggttgcagccgctgttcgaaatcagcgacgccgaaaacatcatcgtggtgggtaaccatgaggtggttgtcgaccacaacgatggttcccggtcaacgctgccgccggtggccgactcggatgccgagctggaatcccagatcgcccggatggcgaggaatgcgaccccgcggcgagccttcgacgccgatcacaccgatgtgacgatcatgcaccaacagaagttccgtatccacgcgatctcttcggaggtgtcgttgcaaccgtcggtggtcatccgccaacatttgctcacccaaatcagtctgggggacctgtcccagcggggaatgatgccggtggaagtggcccggttcctcgatgaggcggtacaagctggcaagtccatcgtggtcgccggcgagcagggggcaggcaagacgacgtttttacgagcgttgatccacgccattccgatgcgggagcggttcgccacgttggagaccgatcaggagttgttcgctcatctgatgcctggccgggaaaacacgctggtgctgttcgcccgtgatggtaacggcgaggtggatccggcgactggcacccagcacggcgctatcgagatcgcccagctgattcctcctagcctgcgccaggcgttaactagggtcattgtcggtgaggtgcgcggcaatgaggcttcggccatgttccaggctatgcagtcggggactggcactatgagcagtatccactccccgcgagcctctgaggtgccgtcccggctagcccaaatgatttcgatgggcccggtctacgatctggatcaggccatgctgcagatcggtcattcgatcgactacatcgtctttgttcgtaagcgtgacctgcctgatgggagccggctgcgatttgttgagcagatccgttcagtctcgcctggtgattcgacaactcccagtcttggcgaggtgtacacggctgactcgtggacaggccagccgcttacgccactcatgcctggttcggccgccgacgagctgtctcacttcgcccgagacctggattactgcgaggcccactgatgaacaccccagcgctgatagcagccctcatcgtgaccggcctgggactgatcatggccatcaacggcctgatcccggccacacccaaacccggcaccacgctgacgctgtcacagcggtgggcccgggccacccaccgcccagccggggcagccgggcgccgacgcgacctgcgctgggcgctggccggtctcgtcggcatcgtgctgttcgtcctcacaggttgggtcgctgccctggccctgggccccatcaccgtgctgctagcacccaccctgctgggggcggccccaccgaccgatattccgctgatggaggcgttggatcggtgggtgcgtcaggtcgctgcggtgctgccacaggggcgagacatcatcacagcggtgcggatctcacggccgcgggccccgaagctgatcgccgggtcggtggatcaactggtgtcccggttggatggccgtatggagccgagggaggcgttccagcggatggccgacgagctggactcggctgaggctgacgcggtgctggcctcactagcgttggcggccactcatccgcggggagcctcgacaacgttgaaggctattgctggcaacatccaacagcggttgaaagtgctgcggcaggtggaggctgagcggtctaagccgcgtaactcggtgcgccagatcacactggtcacgatcgccatgttcggggggctgctcgtgatcggacggtcgtttctggccccgctggcgacccctcccggtcaggtgctggtggccgtggcggtggtcatgtatgtcatcgcactagtgcagatgtatcggatggcgcggccccgtcgacgcacccggatcatggtcaggaggacccgatgaccattactgctttgtccctgctggccggggccatcgtcactgtcggactgctggtcatcgtggcagcgttccgcccagccccaggccctgacctggttgccgctctggaggtggtgtcgggtcgcacctcaagcgtcgccgagaacgtcgaccagacccggatcgggcggataggtcgcagcgtgacccgcacattccatgtgtcggtgtccccggccatgcgggccgcactgcgactccaaggcacgacccccgaagcgttctacggtcgacgcctgatctgcgcactgatcggggcgatcctgccgtggctgctcaacgcggtagccatcgcggtaggggcgaattccccgaacctactcatcccttcggcgctgtgtgtggcgttagctggcgctggatggatgctgccggcagcacggttgaaggctgcggccgggcccaccaacgatgactcgttcgaagcgctgctggtattcatcgatttggtcgtgctggaacggctcgccaacgaaacctccgtcgacgcgctcaccaatgcggcaaacatgtcggactcgccgctattcgtccagatccgtcaagtcctcaaccgtgcctccctggaaaacgtcgacccgtggaacgggctagaccggctagccgaggacatcaaactgcccgaactcaccgatgtggtctccatcgcccgcctccaaaacgaaggcgcctccctcgtcgacagtttccgggcccgagtcgccgagttgcgcgacgcctacctgctgcgcctgcaacaagaatccaccgccatcacccagcggcttggtttgtggacgatcctgcaagccggctcggtcatgctcatcttgctgggggcggccgccctcacactcatcacagccggataaaccgacatcgtgtcgagcccccatatgggccgcgaacctttcataatgatgcctgtaagcaccacaatattgatcacaacctaacaatgaaggagaaatcatgatgaccgatctcgacctggctaaaaaacagatcacctggctggcggcgcacctgcgttcccggatcgttgacgagcgtggcggtggtagctctaccgtggagacactgatttggattggtgtcatcgtggcgctggtgattggtgtgggcgtcggggtgacggcctatatcaggtcgaagatgcctcactgacgacgatgcgtagcaggttcacaactgatcagcgtggcggtggtagcgcgtcggtggggatgctcctgctgatgcctgcgatcatgctgctggcattcggtgggatcgaggtcgggatgtggtgtcacgcccatcagtcgaccatcgcggcagcccaaagcgccgcggaggctcagcgtgtcgtccatccggtcccggggtcggcacaggaggcagcctcgcagatcactagtcatggcggggtgcgtgatacccggatatcggtcagtgatgacggggccactgtcacggtgaccgtctcaggtcgggccccatcgatgctggggctgcatcttccggctgtgtcgtcgacagcgtcgatgcccaaggagcgcctgtcgtgaggcgaagtgagcgcggtggagcaagtctaagcgtcgaggtgctcatgtgggcgccgatcgcgctggtgatcatcgggtttgttgtgggtatcggccggatgtcgatggcccaggacgcggtgaatggcgcggcgggtgctgcggcccgtgcggcgtcgttggagcgtgatggacagtcggctcagtctgcggcgcagcaggcggcgtcggcgaacctgtcgtccggtgggctggcatgtgcgccgaatgtgagcgtggacacgtcagtgtttgcccgtcctgccgggcaggcgggcacggttcacgccacggtcacgtgtgtcacctcgctgggtcttgggttcgggtcccggacggtgcacgcaacggggtctgccccggtagacacctatcgggaaaggagaggctgagatggcccgtgatgagcgtggtggcggctcggtgtcggtgtggatgctgctcatggtgccggtgattctggtcatggccggcctggtttttgacgggtcccgtcagatatcggcaacccaggcggcccaggacgcggcggttgcggcatcccgcgccggaactgatgcggcagcgacaccgcagcttgctggccacgacggggcggccgtagcagtccaagcggcccgccaggcactatctgctgccggggtggacgggtcggtgcaggaggacgggtcgaccatcacggtgaccacgtctcaaagtcggccgacagtgttcctgtcagcgatcggaatcagccaggtaagggggcatgggcaggcccatgctcagcttgtgggaccgggagaacgcccatgacagtgatacgtcgtatcggtgccctggtggcactgctggtggtgatagccggcttaccggccgggctcgtggccgcaggcgccccgctagtaccggcgggcctgtcatgggcccatgtgcggcatctgttggttaccccagacatgaccgggtcggtgctggtgtggctggtcagcctcatcggctggatcgggtgggcatggttcgccctggccgtcgcagccgaagcggtgacgatgctctcagggcagcggctgcactggcacatgcccggccctcgcctagtgcgccgagtggcagccggtcttctcattgccgcgttcgcggccgcaccggcagccacaagcacggctcacgccgccgaggccacccatgtggcggtcgccgcccaggctggaccggcacacgcggcccccgcccaggacagccccgccaccacctctcaggccccggacgcctccaccactccgaaaatctggaagacctacacggtgcgggccaacgactacctgtggaagatcgccgagcactactacggtgacggcg

SEQ ID NO: 239 - DNA, 5203 bp, Propionibacterium acnes
  source 1..5203: mol_type = genomic DNA
gcgataccgcaaggctgtgtgggatcagctgttcgggatggggcggttgcagccgctgttcgaaatcagcgacgccgaaaacatcatcgtggtgggtaaccatgaggtggttgtcgaccacaacgatggttcccggtcaacgctgccgccggtggccgactcggatgccgagctggaatcccagatcgcccggatggcgaggaatgcgaccccgcggcgagccttcgacgccgatcacaccgatgtgacgatcatgcaccaacagaagttccgtatccacgcgatctcttcggaggtgtcgttgcaaccgtcggtggtcatccgccaacatttgctcacccaaatcagtctgggggatctgtcccagcgcggaatgatgccggtggaggtggcccggttcctcgatgaggcggtgcaagctggcaagtccattgtggtcgccggtgagcagggtgcaggcaagacgacgtttttacgagcgttgatccacgccattccgatgcgggagcggttcgccacgttggagaccgaccaggagttgttcgctcatctgatgcctggccgacaagacacgctggtgctgttcgcccgtgatggtaacggcgaggtggatccggcgactggcacccagcacggcgctatcgagatcgcccagctgattcctcctagcctgcgccaggcgttaactagggtcattgtcggtgaggtgcgcggcaatgaggcctcggccatgttccaggccatgcagtcgggtacaggcaccatgagcagtatccactccccgcgagcctctgaggtgccgtcccggctagcccaaatgatttcgatgggcccggtctacgatctggatcaggccatgctgcagatcggtcattcgatcgactacatcgtctttgttcgtaagcgtgacctgcctgatgggagccggctgcgatttgttgagcagatccgttcagtctcgcctggtgattcgacaactcccagtcttggcgaggtgtacacggctgactcgtggacaggccagccgttgaccccgctcatgcctggttcggccgccgacgagctgtctcacttcgcccgagacctggattactgcgaggcccactcatgaacactcccgcactaaccagcgccctcatcatggccgggctagggctgatcctggccatcgacgggctggtcccggcgccgcctcgacctggggccccgctgagcccggcccaaaggtgggccaggctcacccaccgtcccacaggagcggccgggcgccgccgggatttgcgttgggggttggctgttctcgtcggcgtcgtgctgtttgtgctcaccgggtgggtggctgcgctggcgttgggccccatcattgtgttgttggcccccaccctgctgggggcggccccaccgaccgatattccgctgatggaggcgttggatcggtgggtgcgtcaggtcgctgcggtgctgccacaggggcgagacatcatcacagcggtgcggatctcacggccgcgggccccgaagctgatcgccgggtcggtggatcaactggtgtcccggttggatggccgtatggagccgagggaggcgttccagcggatggccgacgagctggactcggctgaggctgacgcggtgctggcctcactagcgttggcggccactcacccgcggggagcctcgacaacgttgaaagctattgctggcaacatccaacagcggttgaaagtgctgcggcaggtggaggctgagcggtctaagccgcgtaactcggtgcgccagatcacactggtcacgatcgccatgttcggggggctgctcgtgatcggacggtcgtttctggccccgctggcgacccctcccggtcaggtgctggtgaccgtggcggtggtcatgtatgtcatcgcactagtgcagatgtatcggatggcgcggccccgtcgacgcacccggatcatggttaggaggagtcgatgacgacgactgctttgtccctgctggccggggccatcgtcactgtcggactgctggtcatcgtggcagcgttccgcccagccccaggccctgacctggttgccgctctggaggtggtgtcgggtcgcacctcaagcgtcgccgagaacgtcgaccagacccggatcgggcggataggtcgcagcgtgacccgcacattccatgtgtcggtgtccccggccatgcgggccgcactgcgactccaaggcacgacccccgaagcgttctacggtcgacgcctgatctgcgcactgatcggggcgatcctgccgtggctgctcaacgcggtagccatcgcggtaggggcgaattccccgaacctactcatcccttcggcgctgtgtgtggcgttagctggcgctggatggatgctgccggcagcacggttgaaggctgcggccgggcccaccaacgatgactcgttcgaagcgctgctggtattcatcgatttggtcgtgctggaacggctcgccaacgaaacctccgtcgacgcgctcaccaatgcggcaaacatgtcggactcgccgctattcgtccagatccgtcaagtcctcaaccgtgcctccctggaaaacgtcgacccgtggaacgggctagaccggctagccgaggacatcaaactgcccgaactcaccgatgtggtctccatcgcccgcctccaaaacgaaggcgcctccctcgtcgacagtttccgggcccgagtcgccgagttgcgcgacgcctacctgctgcgcctgcaacaagaatccaccgccatcacccagcggcttggtttgtggacgatcctgcaagccggctcggtcatgctcatcttgctgggggcggccgccctcacactcatcacagccggataaaccgacatcgtgtcgagcccccatatgggccgcgaacctttcataaggatgcctgtaagcaccacaatattgatcacaacctaacaatgaaggagaaatcatgatgaccgatctcgacctggctaaaaaacagatcacctggctggcggcgtacctgcgttcccggatcgttgacgagcgtggcggtggtagctctaccgtggagacactgatttggattggtgtcatcgtggcgctggtgattggtgtgggcgtcggggtgacggcctatatcaggtcgaagatgcctcactgacgacgatgcgtagcaggttcacaactgatcagcgtggcggtggtagcgcgtcggtggggatgctcctgctgatgcctgcgatcatgctgctggcattcggtgggatcgaggtcgggatgtggtgtcacgcccatcagtcgaccatcgcggcagcccaaagcgccgcggaggctcagcgtgtcgtccatccggtcccggggtcggcacaggaggcagcctcgcagatcactagtcatggcggggtgcgtgatgcgcggatatcggtcagtgatgacggggccactgtcacggtgaccgtctcaggtcgggccccatcgatgctggggctgcatcttccggctgtgtcgtcgacagcgtcgatgcccaaggagcgcctgtcgtgaggcgaagtgagcgcggcggagcaagtctaagcgtcgaggtgctcatgtgggcgccgatcgcgctggtgatcatcgggtttgttgtgggtatcggccggatgtcgatggcccaggacgcggtgagtggcgcggctggtgctgcggcccgtgcggcgtcgttggagcgtgatgggcagtcggctcagtctgcggcgcagcaggcggcgtcggcgaacctgtcgtccggtgggctggcatgtgcgccgagtgtgagcgtggacacgtcagtgtttgcccgtcctgccgggcaggcgggcacggttcacgccacggtcacgtgtgtcacctcgctgggtcttggattcgggtcccggacggtgcacgcaacggggtctgccccggtagacacctatcgggaaaggagaggctgagatggcccgcgatgagcgtggtggcggctcggtgtcggtgtggatgctgctcatggtgccagtgattctggtcatggccggcctggtttttgacgggtcccgtcagatatcggcaacccaggcggcccaggacgcggcggttgcggcatcccgcgccggaactgatgcggcagcgacaccgcagctagctggccacgacggggcggccgtagcagtccaagcggcccgccaggcactatctgctgccggggtggacgggtcggtgcaggaggacgggtcgaccatcacggtgaccacgtctcaaagtcggccgacagtgttcctgtcagcgatcggaatcagccaggtaagggggcatgggcaggcccatgctcagcttgtgggaccgggagaacgcccatgacagtgatacgtcgtatcggtgccctggtggcactgctggtggtgatagccggcttaccggccgggctcgtggccgcaggcgccccgctagtaccggcgggcctgtcatgggcccatgtgcggcatctgttggttaccccagacatgaccgggtcggtgctggtgtggctggtcagcctcatcggctggatcgggtgggcatggttcgccctggccgtcgcagccgaagcggtgacgatgctctcacggcagcggctgcactggcacatgcccggccctcgcctagtgcgccgagtggcagccggtcttctcattgccgcgttcgcggccgcaccggcagccacaagcacggctcacgccgccgaggccacccatgtggcggtcgccgcccaggctggaccggcacacgcggcccccgcccaggacagccccgccaccacctctcaggccccggacgcctccaccactccgaaaatctggaagacctacacggtgcgggccaacgactacctgtggaagatcgccgagcactactacggtgacggcgcccaattccgtcgtatcgccgaagcctccggtatcgacccgcactcagagctgaaagtcggccagaaactggtgctaccggttcccgagaacacggccgcgatccattcggttaaagcgggggagtatctgtgggagatcgccgagcactactacggtgacggcgcccagtaccataaaatcgcggaagcttccggtatcgatgcccattccgatctagccgtgggccaaaaactcgtcatccccgggcccctccgccacgacgccacgccgccacaccactcggcgtcgacccacgcgaag

SEQ ID NO: 240 - DNA, 2238 bp, Propionibacterium acnes
  source 1..2238: mol_type = genomic DNA
gacgccggccaccccaactactccgacccacacggtgaccccagctccggcctctgccggccactcgaccagcgacgagcacccactccatacggataccgccacagcggacaaggccagcgacgaggacgccctgtccccaatccaggtgggcttgaccgccagcgtcggactggtgctggtcgccggactgatcaccaccctcaaccgccgctaccggacccggttcacccgccagccccgcggcaaggccatgaccctgcccagcccggacgcccaaactgccgagatagcgctgcgcagcaccggggcgactgacactctgacgatcacctgcctcgaccaggcgctccgcgcgatcggcgcatggtgccaccactgcgggcacccgctgccacccctgctggccgcccgcgtcgacgacgaccggatcgacctgctgctatcccaggcggcccccgaccatcccgaggcggtggagctggccgccgacggatcggtgtggaccctcaccgccgaccggatcgacgacctgctagcccacaccgatgacaaccaagcggctccgtggccagctctagtcacactgggacgcgacgacgacggcgcccacatcctcatcgacttggaagccgcaggaaccttgcacctgatcgccgacgacgaccaggtcgacgcagccctcgccgccatcgccgtggaactggccacctgcgactggtccgacgaagtcaacgtcaccctcgtcggccaagtgtgcccgggcctagaagaggccttgggctctccaaccctgacccgcgccaccgacgtcgacgctctcttggagacgttggaggctcgcgccgacgatcagcgacacatcctcaccgaaggaaaccccctcgccgctcaccgagccgaccccgccatctccgacgggttcgacgccgaagtgatcctcctcgacaccgaactcaccgaagaccaccgcaaccgcctcgccagcctcgtcgaggctcttccccgcgtgtcagtcgccgcggtaacaaccagccccaccagcccacacgaatggtccctcaccctgacaggtgacccactagccgccgacctggctcccctcggctggcacatccacccccaaaccctctcccccgacctgtacaaccgcatggttgaactactcgccaactccgccgccgcagactacgaacccgccagctggtggaaccacgacgccgacgacgagcccaccaccgaccccaccaacgaggaagaatctaccccgagcaggcgagcccgcccgaatatccgcctgaccaccctgaccggcggcatcgacctatccagcgtcgacatcgacgacatcatcgacgaagccaaccaggccctcgacaacaccgaccagaccaccaaccaggttcgcgtcgacaccgaccaacccggcaccgacacccccttccccatcgacgacatcgacccgctgagctccgaccacccggtcctatccatcatcggccaccccgacatcacaggtgccactggaaccgttgggcgctccccgtggcgctgccaacagttggccctctacatcgctgagcatccgggagcatcgggggcgactatcgccgatgatttggggctatcagcgccgacggtgcgctcgattgctacacacctgcgacactggttgggagccgacgatgccggggtggcttacatgccggcggcgacgcgcggctaccggctcgatgagcggatcgtcacagatgtggacctgatcgacgctgctgtggccggggcaggcattaacaccgctgagacggccacactggtggccattttgaagctgggccgcggacgggtcttcgctggggttcctgactcggaacttcgccagttcagggcgtcgatgtaccacgtggaggcccgcatcgtcgatgctgccctccaagtgacagaccgggccctggaagccggagacttggggctggcccggtgggcgctgacccaagggctactggtgtctcccgatcatgaggacctggtcgccggttgtctgcgcaccgaataccaggccggcaacatggacaaggtcgccgagctggtcgatcacctgtcggctaccgcacgccgactgggcgtcgacctcaacgaggacaccacccggatcatcgatacggtcacccacgccgacaggagagcatcatgatctcccctgcactcatctccgtcaggaaggttcctatgcaccat

SEQ ID NO: 241 - DNA, 739 bp, Propionibacterium acnes
  source 1..739: mol_type = genomic DNA
acgtgcgggtacacctaccagcaggcagccccggaaggcggttatcaggtcaccgcaatcacgtcgtgggatgtgacctggtcggtactaggacacacgggcacagtccatatcgagaaggccggtgggcagatgcttccggtcggcgagttggagtctgttgttacacggcgatgactcctgatagtccgacgctgtatgaggtgttgggggtctgccctgatgccactgatgaccagatcaagacggcgtggcgtcgtgccgcgaaagtgactcaccctgatgccggtggcactagtgaggcgttcgcggccgcccggcacgcctgggaggtgttgtctgatcctgcccggcgcaccgcctacgatgccgacctggcgggggaggatgatcccgacgacgaagccgccgacgccttcgacgttgatccgttcacggcatggccctggtgcgccccgtacatcgacgccacccccaccctgcgccacacctgccccggcacgatcaaggccatcgtggtcgccatcgccgggatcatggccggaatcggctggcaggaagcgctggaggccgtggtgtcgccgccggggtttctgggggcgtgctggatagtctcagtgccggttgtcgtcgcagtgacatggctggcagcggtgacgggtctggcatttttcaccatggcggccatctggtgtggatggtcgttgataggtggtgcgttgctgtggggccagacgtc

SEQ ID NO: 242 - DNA, 4920 bp, Propionibacterium acnes
  source 1..4920: mol_type = genomic DNA
ggccatcctgcggccgcaatagccgcgacggcgaccacccacacgatctgttgcatgggtctcatcatggcccatcatcgatgagtatgggtggccgacatggggtcactcgtagaggggatcgaggggtgtgcgggcgagcatggcttcctgtgtgccgagcatgagggtgccagagtcgtcgccggccgattcccagtcgacgatgatctgcccgctgtcgacgctggattcggtgatggtcacccattctccgtcgatattgatgagcaccccagcggccagctctgtggcagcaaccgggtgggctgggctgtagaggaggtcgatgtcgcgggcagggtcgtcgggttcttcggttacctcgggtggggtcgatctggctgtctcggtgtcgtcggccaggtcggctcccaggatgcgttcccattcggggctggttttcttgcccgctgaggccatcgtctcgtcgatctgttcgtcagtgggccacacaaatttctttttggtccaggtcgtggtgtcgggtcgcagctgatccagcagttccaggtcttgcggggagtgggccttgcgggggtcgggggtgtagaagaattggacttccttgggggctgattcgccggataggtaggtgccgcggccgcgtttgccgaacgggattcccacgccgacgtgttcggagccgaacatcatgcgggctccgtcagcggacaggggtccggtggcggcacgcccggagaagttgtctcggatttcgccgcccaggaactcggcgtcggggcgttgggtccccagatcgacgtggatacggcaggcggctgccatgcgcagcagggagccgatccagccgaaaacggggcattctccgggcatcccagagaccttgatcgttgaccaccagtttttcgcgttgccgtagaactggcggtactcgtcgatgaggaccagcacgcgggtgaagtcggtctcgcgggccccttcttcttcgatgcggcggtagcggtcctccatgagagaccacagccagtggatgagggcgacctggtcggggacggtagtggcgaccatctcgatgttgggccactcccgcaggcccaggtactcgatgcgtttagggtcgatgacgaagacgcgccagttgcggcgggcaccctcgacggcgtcgccgatcatggacaccgtttttccggtacgggtgcggccggccttgagctggtgggccatgacaccggagatgtcccagaaacaggtgttgccgtcctcgtcgacggcctgggggattttctcccagtctggggagtctgggcccggaagggccacgggtcggggcaccatcgagggcagggggtggcggcgggtgacggtgatggtgtcgtgttccaggtcgaagtcgctgcgccactggccgagcatcatcgccgaggtcaccgcggccaggcgcaattggatgttcgggctggacaaatgggcgccacgttggtggtgaatggtgaagccgtccaggttcccccgatcggttttccaggaatcgacggtgaccgccgacccatagatctgagtggctacttctttagcccgttccttgtctcggtccagatcggttttgtcagggtcaggggtcggggcgcggtattgcaggacgaaccggccggccgggatcgttgcggatgtcaccgtgaactctgccggcgaccaggcagccgcggccgcctgggtgagggccattggcatggtctcgacggcagcctcctcgggggggatggtgagggtcaggcgtcgcggatgcgtcttcttgcgattccatgtgactttctgcctcaccggcaccttcgccgccgactgaatggctaggcgagctgattcggcagtttcggtacgccggccagcgcgtagcgcccgtcgtgcgtgaaggctgcccaccacagcacagcccatacacggcagccaccagcgcggatcagcggctgctgcatagcccccggtagctagtaccgcacctgaccagccggccgcgatacttttccacgccggtttcgcaccaacagtcggggcagacgctggccgcttcgagaccgaggagggacgagacaagggagtgctggtcatgccgcggcctccttgtggcaggtcatttcacaggcatgccggccagcgatgatgccgtggcgcaccgccccggtagccgcatagaccgcgcacaactcaaacacggggcacccatcgcaggccgccgggttcatgctttctttgtcccacgatggtgggtcatcggtgcacggcacggccaggccatcctgttgagcggcgctgatagcggtgaataggcgcagctgggcgcgaacttggtctggggtcaggttgacggtgcgggctacacgcatggggttccttcctcttcaccagtgaaggttccctagacccggccgatgtgcggagggatttcagtgttttatcgaggtgaccagccagccggtctgcgctgcgggttcaggtaccagggtcagatgcaccacggtgtggtcggctaggggcacggcgaccaggggcccgtcggcgctcgccccggtgagggtgggagttccggccacggtggtggcgggaatctggttgggtttcgcggccatcagggagcccatgagggtcggggcggcgatctggacgagggcgactttgcgggcggcgggatcgcgggtcaaccagccgcgggtgaaggtgagcgcagccgacgtgatatcggggctcagcggggctggtgtggcggcggggtgggccgttgaggagggccatacgcgcggtagcgctggcgacatcgagcgggtcggagtggggtcaggtgtggggcttagggtccgatgtggcgatggggctaccgccccggtggtgggagacgagactggttgggggtggtgttgagggcgtgggatcagggtgaaggcagccaaactggccgggatgaggatgacggccgcgccgacacttcggagcgaggtcatgtgacgatccttcggtagctcgacgggttgccgtagatcttttccacgttgatgccactatgtgggttgtcggcgctaaccatttggcctccaccgatgtagacggccacgtggtgggcagggcttccccagaggatgaggtcgccgactttgagctggtcacgggccacagcagtgccgactttctgctggtcggcggcggtgcggggaaggctaatgccgatacgccggtacagcgccgaggtcaggcctgagcagtcgtagccgccatcggctttgccgttaccaccccacacgtaggcgtaggagttgttgtcggcgatcgatttggcccatgccacggcttcggccaggttcttcgacacaccggtctcgttagcggccccggtggcacagttgtttgacaggtgccctgtagtagtggatcccactatttgtttggccatggtttcccatttggcgtaggcatcgggcagggctgagccttgcactgcctgagctgcctgcgtcagcggcatcttctgccagtcagcgatgtcgactaaaccgggaatgtggaatccagggccgccggccgatccggggccagcgtaggtgatggtgtggcctttcaagaacgcctcggtggcgtaggcatcattgttgacctgatccagagtcccgtaccagcccggcaggatgcgctgctgaaaggggccggcgtcaccgtcaccgttagccttcgctgaggtagggtcggccccaagatctgattcttgtttggcggtcatgatagcgatgaccgctgcctgggtaggcagtttgtcacgctggaccacagtgacgatggtggtcacgagctgcttctgcctggccgtgaggcctccggcacccacagtgcctccggtgacggtacccacgcaagcatccccgccgacactgccaccgccgccgccagagttgtcgtcgagggccccagagcctactgacagcagcggcacaatgatcacggtcgctggcaagaccgccaggcccgccagcatcagcactgctgcactcaccacggcgatcacgtgagatgctttcaacgctgcccacctctcgctggtttgagggggcgacgcctgctggtacgcacaggcttggttgatccagtccgccgttgattggcaggcctgggtttgatcggcttgctgggacccggtttgggctccggagtcttaggctccggcttcacatgcctaggcacttcggctgcggtgggaggagtcagcacgtggcgtaccggcttggtgaccttctgggcacccgaaacaaccggcttagacaccaccttggcacctttgaccaccggtgcggctgccttcgcgccggccttcttgactgcacgatgcgctttgatagccccggcctcggcccggccaaccctactagcagtagcatcgagggctctgtggcccgtcgttgccctcaccggtgcatccttgccctggcgggtctgcttcgcgatcgccgacatgccgcctcgcaatgccgaaacatgattgtgggcgtgggcgatcgccgacatgccggccgtcgcgatttttgactggccctgcggggcccctgccccagcacgaatctgccggtaagccgccgacgtgccacgagcacccgccgccattcgcgccaccttcgcagccctagtcactcccgtcgacacgccacccgtggctaccgcagcagcacccgagaccacagtcgaggccatccgccttcgacccgatccggtgagcttgcgaccaccactgcgcaccatccggcgagcaccccgcccagcccactggccgatcaccgagcccctttcggaacgcttgctgcgcatccaatcgttgatcttgtccctcagccccttctcgcccttgtgacgacgccacatggacatcaagaacccgataatccc

SEQ ID NO: 243 - DNA, 4903 bp, Propionibacterium acnes
  source 1..4903: mol_type = genomic DNA
gcgataccgcaaggctgtgtgggatcagctgttcgggatggggcggttgcagccgctgttcgaaatcagcgacgccgaaaacatcatcgtggtgggtaaccatgaggtggttgtcgaccacaacgatggttcccggtcaacgctgccgccggtggccgactcggatgccgagctggaatcccagatcgcccggatggcgaggaatgcgaccccgcggcgagccttcgacgccgatcacaccgatgtgacgatcatgcaccaacagaagttccgtatccacgcgatctcttcggaggtgtcgttgcaaccgtcggtggtcatccgccaacatttgctcacccaaatcagtctgggggacctgtcccagcggggaatgatgccggtggaagtggcccggttcctcgatgaggcggtacaagctggcaagtccatcgtggtcgccggcgagcagggggcaggcaagacgacgtttttacgagcgttgatccacgccattccgatgcgggagcggttcgccacgttggagaccgatcaggagttgttcgctcatctgatgcctggccgggaaaacacgctggtgctgttcgcccgtgatggtaacggcgaggtggatccggcgactggcacccagcacggcgctatcgagatcgcccagctgattcctcctagcctgcgccaggcgttaactagggtcattgtcggtgaggtgcgcggcaatgaggcttcggccatgttccaggctatgcagtcggggactggcactatgagcagtatccactccccgcgagcctctgaggtgccgtcccggctagcccaaatgatttcgatgggcccggtctacgatctggatcaggccatgctgcagatcggtcattcgatcgactacatcgtctttgttcgtaagcgtgacctgcctgatgggagccggctgcgatttgttgagcagatccgttcagtctcgcctggtgattcgacaactcccagtcttggcgaggtgtacacggctgactcgtggacaggccagccgcttacgccactcatgcctggttcggccgccgacgagctgtctcacttcgcccgagacctggattactgcgaggcccactcatgaacactcccgcactaaccagcgccctcatcgtgaccgggctagggctgatcctggccatcgacgggctggtcccggcgccgcctcgacctggtgccccgctgagcccggcccaaaggtgggctcggctcacccaccgtcccactggtgcggccgggcgccgccgggacctgcgttgggggttggctgttcttgtcggtgtcgtgctgtttgtgctcaccgggtgggtggctgcgctggcgctgggccccatcattgtgttgttggcccccaccctgctgggggcggccccaccgaccgatattccgctgatggaggcgttggatcggtgggtgcgtcaggtcgctgcggtgctgccacaggggcgagacatcatcacagcggtgcggatctcacggccgcgggccccgaagctgatcgccgggtcggtggatcaactggtgtcccggttggatggccgtatggagccgagggaggcgttccagcggatggccgacgagctggactcggctgaggctgacgcggtgctggcctcactagcgttggcggccactcatccgcggggagcctcgacaacgttgaaggctattgctggcaacatccaacagcggttgaaagtgctgcggcaggtggaggctgagcggtctaagccgcgtaactcggtgcgccagatcacactggtcacgatcgccatgttcggggggctgctcgtgatcggacggtcgtttctggccccgctggcgacccctcccggtcaggtgctggtggccgtggcggtggtcatgtatgtcatcgcactagtgcagatgtatcggatggcgcggccccgtcgacgcacccggatcatggtcaggaggacccgatgaccattactgctttgtccctgctggccggggccatcgtcactgtcggactgctggtcatcgtggcagcgttccgcccagccccaggccctgacctggttgccgctctggaggtggtgtcgggtcgcacctcaagcgtcgccgagaacgtcgaccagacccggatcgggcggataggtcgcagcgtgacccgcacattccatgtgtcggtgtccccggccatgcgggccgcactgcgactccaaggcacgacccccgaagcgttctacggtcgacgcctgatctgcgcactgatcggggcgatcctgccgtggctgctcaacgcggtagccatcgcggtaggggcgaattccccgaacctactcatcccttcggcgctgtgtgtggcgttagctggcgctggatggatgctgccggcagcacggttgaaggctgcggccgggcccaccaacgatgactcgttcgaagcgctgctggtattcatcgatttggtcgtgctggaacggctcgccaacgaaacctccgtcgacgcgctcaccaatgcggcaaacatgtcggactcgccgctattcgtccagatccgtcaagtcctcaaccgtgcctccctggaaaacgtcgacccgtggaacgggctagaccggctagccgaggacatcaaactgcccgaactcaccgatgtggtctccatcgcccgcctccaaaacgaaggcgcctccctcgtcgacagtttccgggcccgagtcgccgagttgcgcgacgcctacctgctgcgcctgcaacaagaatccaccgccatcacccagcggcttggtttgtggacgatcctgcaagccggctcggtcatgctcatcttgctgggggcggccgccctcacactcatcacagccggataaaccgacatcgtgtcgagcccccatatgggccgcgaacctttcataatgatgcctgtaagcaccacaatattgatcacaacctaacaatgaaggagaaatcatgatgaccgatctcgacctggctaaaaaacagatcacctggctggcggcgcacctgcgttcccggatcgttgacgagcgtggcggtggtagctctaccgtggagacactgatttggattggtgtcatcgtggcgctggtgattggtgtgggcgtcggggtgacggcctatatcaggtcgaagatgcctcactgacgacgatgcgtagcaggttcacaactgatcagcgtggcggtggtagcgcgtcggtggggatgctcctgctgatgcctgcgatcatgctgctggcattcggtgggatcgaggtcgggatgtggtgtcacgcccatcagtcgaccatcgcggcagcccaaagcgccgcggaggctcagcgtgtcgtccatccggtcccggggtcggcacaggaggcagcctcgcagatcactagtcatggcggggtgcgtgatacccggatatcggtcagtgatgacggggccactgtcacggtgaccgtctcaggtcgggccccatcgatgctggggctgcatcttccggctgtgtcgtcgacagcgtcgatgcccaaggagcgcctgtcgtgaggcgaagtgagcgcggtggagcaagtctaagcgtcgaggtgctcatgtgggcgccgatcgcgctggtgatcatcgggtttgttgtgggtatcggccggatgtcgatggcccaggacgcggtgagtggcgcggcgggtgctgcggcccgtgcggcgtcgttggagcgtgatggacagtcggctcagtctgcggcgcagcaggcggcgtcggcgaacctgtcgtccggtgggctggcatgtgcgccgagtgtgagcgtggacacgtcagtgtttgcccgtcctgccgggcaggcgggcacggttcacgccacggtcacgtgtgtcacctcgctgggtcttgggttcgggtcccggacggtgcacgcaacggggtctgccccggtagacacctatcgggaaaggagaggctgagatggcccgtgatgagcgtggtggcggctcggtgtcggtgtggatgctgctcatggtgccggtgattctggtcatggccggcctggtttttgacgggtcccgtcagatatcggcaacccaggcggcccaggacgcggcggttgcggcatcccgcgccggaactgatgcggcagcgacaccgcagcttgctggccacgacggggcggccgtagcagtccaagcggcccgccaggcactatctgctgccggggtggacgggtcggtgcaggaggacgggtcgaccatcacggtgaccacgtctcaaagtcggccgacagtgttcctgtcagcgatcggaatcagccaggtaagggggcatgggcaggcccatgctcagcttgtgggaccgggagaacgcccatgacagtgatacgtcgtatcggtgccctggtggcactgctggtggtgatagccggcttaccggccgggctcgtggccgcaggcgccccgctagtaccctcgggcctgtcatgggcccatgtgcggcatctgttggttaccccagacatgaccgggtcggtgctggtgtggctggtcagcctcatcggctggatcgggtgggcatggttcgccctggccgtcgcagccgaagcggtgacgatgctctcagggcagcggctgcactggcacatgcccggccctcgcctagtgcgccgagtggcagccggtcttctcattgccgcgttcgcggccgcaccggcagccacaagcacggctcacgccgccgaggccacccatgtggcggtcgccgcccaggctggaccggcacacgcggccggcacccaggacagccccgccaccacctctcaggccccggacgcctccaccactccgaaaatctggaagacctacacggtgcgggccaacgactacctgtggaagatcgccgagcactactacggtgacggcgcc

SEQ ID NO: 244 - DNA, 4609 bp, Propionibacterium acnes
  source 1..4609: mol_type = genomic DNA
gataccgcaaggctgtgtgggatcagctgtgccgctctcccgacatggcagacagcaccctgcggactgactgacactgtggcgccgcggaggtctcccgcggcgtccgctggggcgagtgcatgcctgtcagctcatcttttatcgtcatgtttccccttgtcagagcggtctttgcaaagtgacaacgtcaggggtcttgacgacaacatcctcgacaacatcgtggcggtggtctgtgtctcgtcagttcaacgcaccggggaaagaggcaccgctgatgttcaccaccacaaacaccctcaacgatgagtgggaccagattcgcgccactgagatcgattggcatgactgccctgaactgatgcactgcatcgacgttgatgatgtgttggccgtcattcctgccgcccccgacgccatcttgggctacctcattgcccgggctcagggcggtgacgagttggccacccgcactatcatccaagcgttcacaggcaagcttatcttgatggccacggccaccaaggtgcgccgtactaatgacggcttcaatgatctgttggcgggtctgtgggagacgatcatcacgtacccgttggatcgtcgccctgacaagatcgctgcgaacctcatcctcgacacgttgcaccgggttacccggttctggcgtgctgattcccccgatgaggaagaggctcacggtctggtgcccttccctgacactctcatcgccccagagcccgatgaggacgtcacagctagccaggccatcgccttggcggtggaccgcaactggattaccgaggacctagcccgcctcatgagccatatttactgtgacggtatgactggagctgatgcgggtcgtctgcatggctgcgctccagctacggtgcgatctcgatgccgtgatggtcgggccgtgttgcagcgcaacgccgagacgatcctggccgtctgctgatccctctcttgctcatgcctgccgccaccctacccctacctgctagaaacatagccatgtctccagcaacgcatctagcgtatcttctagcaattgatctagctatgtatatagctgatgatctagctaccatatagctgtgtctccagcccaaaggacagcccaatggcatgcttgccacaggaaggtgcgtcagcctcccgaaatactggaaggagctttaccgtgcaggacatgacctcgaccagaccgattgaccgatccccgttcgaccgcactattgcggtgtggaaccacaaaggcggcacgttcaagacgtccgtcgtggcgaacctgggatacctgttcgccgccggtggcaacaaggtgctgctggtcgacatggacccccaggccaatctcgacattgacttcggtatacccgcgggagaacgtgaacggggcatgggattagccgaggcgctacgtgaggggacggcccttcccccaccgcagcatctcagcgaaaaccttcacctggtcagtggcggcgctgctctcaacgagttcaccgaccccgcatccttagcggccatcctcgaccgagtcaccaccgcacgctacgacctgctagctcaggcccttgccccgctggcctgggactatgacctcatcttcatcgactccgggccggcacaaactctgctgtcccagaccatccttggagtagcccgctggctggtagtgcccacccgcaccgataacgcctcaatcactggcctcgtcgacgttcaagacgccatcgacggggttgcctcctgcaaccctgaccttcaactactcggcgttgtcctagccggcgtgggggcccgggccacccggatcgccgcagataaacgccacgccatcgacacagtgctgggggcaggaaccgttttcgatgcggtcatccactactccgagaaggtgtccgtgctcgcacgccagcagggcaagaccgtcgccgagctagccaacgagtaccacaacacccagcccgcctacacctacctagctaaaggccagaacatccccaacgtcgccaaggcagccgtcagcatcgaaactgattatctgaggctggccaccgagatcagcgaccgcatgttcaccagcgacgagcaggagcctgatcatgactgacgatccgactccatccgagcagaacaaccccaccagcgacgacatgcgcttggccgaagaatgggccaacagcggccgcacagtgggagccctgccgcgccgtcaacggcctcagcgacccacaccccgcaccaccagccaaccccctgtctcgtcccctgacacaccggctccgaaaaaaccccagaagacccccaccagccagcctggccgtcaacggatcaacgtcaccgtctacgttgtgcccgaactccatgagcggctgcgctcccgatcggcggcgacgggggtgacggtctcggatctggtggtgcatgcgttagcgttcgtcgccgatcatgcgggggaggcgatcgccgatgatctgcgcgtcgagacgggccccggcatgggggccggactgttcgatgtgaccccatcgcggccagtaggggtcgccaaaacccagctgggggtgcgaatgacccgccacaacaaggatggtttggaccagctgacccggacgagtggagcccgtgaccgcagccatcttgtgtctgtcgccgtgcgcgactatctcgactccaaccctgtaaagaaaggccgacatgtccgctgatgaaactcctgccgcccggggtgggcgacgctttgatacgaccgtcaagcccaggcgccgtcccatgcttatcgccgccggtatcgccatcgtgatagtcggcgcgctcctcatcactcagttgattcgctccgcccaaaccgagcatcgcgtgctggaagtccacgccgatgtggctcgcggcgaggtcatccgtgacaccgatctggtatcggtgactgtcggccaggtcgacaacgtatcaacggttcccgcagaccagctcgactcactggtcggcaaacgcgccacggcagatcttcgagccggatcactcttgcctgctggggctatcggcccggccgatgtcgttccagctccgggcaagtcgctggtcgggctgaagctagccgccggacagatccctatcggagaccttgctgtcgggacgaagctgcgcctgatccagacgtcggcacccagcggctcatccaccaccactgatagcagcaccaataccgatggccagtcgtgggaggcaacaatggcgaccggcaccaaaaagaccgagcaggtcaccttgatcaacgccgaagtgaactcgcgtgatgccgcccggatcgcccaactgacgtcacagggccgtatcgccgtagtgaaggatccgatccgatgagcaccattgttttgaccagcgtctcgggagccccaggggtcaccacgacagcgatcgggctgggcagggtctggccacaatcgagcctggtcgtcgaggatgacacccaccacgccatgctggcgggctacctgcgagcctcccagcacgccgaaccgaacctggccgcagtggcgaacctgacgtcgactccaaccaacgcccaaacggtgtgggaatctatcgccagacccctacccaccgatgacccagtcggcgggctgcgacgcaaaggcatcctcggcccgcccacgccgtggtctcgcgcaggcatcgacccccgatggggattcatgctggccctgtggcggcaactggaggaggctggcatcgacaccatcatcgatttgggtcgcctagccacaccactgacctcaacgccacacctgatcgccgcacccatcgtcgaggacgccgacatgatcttggtgatgatcgaggcgacactacgcgacatcgccggcgcccgcacgatggtggagggactcgctgagcagatgaacttggccggcgcctaccgacgtctcggactgcttgtccaccgtggcggccaggcccgcggcgtcgccgagttcaatgacaaggagatcacctcggcgttacgactcccggtcatcggggccattacccacgacccggccggagccgcccaactctccgacggggtcgggcagcggttcgacaagtcacgtctggcccactcactatcaaaggtggcggccagcctcgtcgatgccataaacaagcgccacgctgatgacgaggaggatctgtgatggccagttttgctgataatccgttcgacaagctgcgctcccaggatgcggcaagagcttcggtagagcaggagcctgatgccggattagcgtcggagttgttttcgacgtcgtcggggtgggccagctctcagcaggtgtcccaagctcaaccggtgatgacccgttcggagaacgtggattggccggttgtcgcggagctagccagtacggccactgatgaggttgaggctgagatcagcaggtggagttccactcatgatggggtggcgacgctagacattcgccaggccatcgcggagcctgctattgcctcggcggtgtctacgtatgctgaccgacgccagatcgatgtaggggagacctggcctgatctggtacgccagcgataccgcaaggctgtgtgggatcag

SEQ ID NO: 245 - DNA, 4613 bp, Propionibacterium acnes
  source 1..4613: mol_type = genomic DNA
gcgataccgcaaggctgtgtgggatcagctgtgccgctctcccgacatggcagacagcaccctgcggactgactgacactgtggcgccgcggaggtctcccgcggcgtccgctggggcgagtgcatgcctgtcagctcatcttttatcgtcatgtttccccttgtcagagcggtctttgcaaagtgacaacgtcaggggtcttgacgacaacatcctcgacaacatcgtggcggtggtctgtgtctcgtcagttcaacgcaccggggaaagaggcaccgctgatgttcaccaccacaaacaccctcaacgatgagtgggaccagattcgcgccactgagatcgattggcatgactgccctgaactgatgcactgcatcgacgttgatgatgtgttggccgtcattcctgccgcccccgacgccatcttgggctacctcattgcccgggctcagggcggtgacgagttggccacccgcactatcatccaagcgttcacaggcaagcttatcttgatggccacggccaccaaggtgcgccgtactaatgacggcttcaatgatctgttggcgggtctgtgggagacgatcatcacgtacccgttggatcgtcgccctgacaagatcgctgcgaacctcatcctcgacacgttgcaccgggttacccggttctggcgtgctgattcccccgatgaggaagaggctcacggtctggtgcccttccctgacactctcatcgccccagagcccgatgaggacgtcacagctagccaggccatcgccttggcggtggaccgcaactggattaccgaggacctagcccgcctcatgagccatatttactgtgacggtatgactggagctgatgcgggtcgtctgcatggctgcgctccagctacggtgcgatctcgatgccgtgatggtcgggccgtgttgcagcgcaacgccgagacgatcctggccgtctgctgatccctctcttgctcatgcctgccgccaccctacccctacctgctagaaacatagccatgtctccagcaacgcatctagcgtatcttctagcaattgatctagctatgtatatagctgatgatctagctaccatatagctgtgtctccagcccaaaggacagcccaatggcatgcttgccacaggaaggtgcgtcagcctcccgaaatactggaaggagctttaccgtgcaggacatgacctcgaccagaccgattgaccgatccccgttcgaccgcactattgcggtgtggaaccacaaaggcggcacgttcaagacgtccgtcgtggcgaacctgggatacctgttcgccgccggtggcaacaaggtgctgctggtcgacatggacccccaggccaatctcgacattgacttcggtatacccgcgggagaacgtgaacggggcatgggattagccgaggcgctacgtgaggggacggcccttcccccaccgcagcatctcagcgaaaaccttcacctggtcagtggcggcgctgctctcaacgagttcaccgaccccgcatccttagcggccatcctcgaccgagtcaccaccgcacgctacgacctgctagctcaggcccttgccccgctggcctgggactatgacctcatcttcatcgactccgggccggcacaaactctgctgtcccagaccatccttggagtagcccgctggctggtagtgcccacccgcaccgataacgcctcaatcactggcctcgtcgacgttcaagacgccatcgacggggttgcctcctgcaaccctgaccttcaactactcggcgttgtcctagccggcgtgggggcccgggccacccggatcgccgcagataaacgccacgccatcgacacagtgctgggggcaggaaccgttttcgatgcggtcatccactactccgagaaggtgtccgtgctcgcacgccagcagggcaagaccgtcgccgagctagccaacgagtaccacaacacccagcccgcctacacctacctagctaaaggccagaacatccccaacgtcgccaaggcagccgtcagcatcgaaactgattatctgaggctggccaccgagatcagcgaccgcatgttcaccagcgacgagcaggagcctgatcatgactgacgatccgactccatccgagcagaacaaccccaccagcgacgacatgcgcttggccgaagaatgggccaacagcggccgcacagtgggagccctgccgcgccgtcaacggcctcagcgacccacaccccgcaccaccagccaaccccctgtctcgtcccctgacacaccggctccgaaaaaaccccagaagacccccaccagccagcctggccgtcaacggatcaacgtcaccgtctacgttgtgcccgaactccatgagcggctgcgctcccgatcggcggcgacgggggtgacggtctcggatctggtggtgcatgcgttagcgttcgtcgccgatcatgcgggggaggcgatcgccgatgatctgcgcgtcgagacgggccccggcatgggggccggactgttcgatgtgaccccatcgcggccagtaggggtcgccaaaacccagctgggggtgcgaatgacccgccacaacaaggatggtttggaccagctgacccggacgagtggggcccgtgaccgcagccatcttgtgtctgtcgccgtgcgcgactatctcgactccaaccctgtaaagaaaggccgacatgtccgctgatgaaactcctgccgcccggggtgggcgacgctttgatacgaccgtcaagcccaggcgccgtcccatgcttatcgccgccggtatcgccatcgtgatagtcggcgcgctcctcatcactcagttgattcgctccgcccaaaccgagcatcgcgtgctggaagtccacgccgatgtggctcgcggcgaggtcatccgtgacaccgatctggtatcggtgactgtcggccaggtcgacaacgtatcaacggttcccgcagaccagctcgactcactggtcggcaaacgcgccacggcagatcttcgagccggatcactcttgcctgctggggctatcggcccggccgatgtcgttccagctccgggcaagtcgctggtcgggctgaagctagccgccggacagatccctatcggagaccttgctgtcgggacgaagctgcgcctgatccagacgtcggcacccagcggctcatccaccaccactgatagcagcaccaataccgatggccagtcgtgggaggcaacaatggcgaccggcaccaaaaagaccgagcaggtcaccttgatcaacgccgaagtgaactcgcgtgatgccgcccggatcgcccaactgacgtcacagggccgtatcgccgtagtgaaggatccgatccgatgagcaccattgttttgaccagcgtctcgggagccccaggggtcaccacgacagcgatcgggctgggcagggtctggccacaatcgagcctggtcgtcgaggatgacacccaccacgccatgctggcgggctacctgcgagcctcccagcacgccgaaccgaacctggccgcagtggcgaacctgacgtcgactccaaccaacgcccaaacggtgtgggaatctatcgccagacccctacccaccgatgacccagtcggcgggctgcgacgcaaaggcatcctcggcccgcccacgccgtggtctcgcgcaggcatcgacccccgatggggattcatgctggccctgtggcggcaactggaggaggctggcatcgacaccatcatcgatttgggtcgcctagccacaccactgacctcaacgccacacctgatcgccgcacccatcgtcgaggacgccgacatgatcttggtgatgatcgaggcgacactacgcgacatcgccggcgcccgcacgatggtggagggactcgctgagcagatgaacttggccggcgcctaccgacgtctcggactgcttgtccaccgtggcggccaggcccgcggcgtcgccgagttcaatgacaaggagatcacctcggcgttacgactcccggtcatcggggccattacccatgacccggccggagccgcccaactctccgacggggtcgggcagcggttcgacaagtcacgtctggcccactcactatcaaaggtggcggccagcctcgtcgatgccataaacaagcgccacgctgatgacgaggaggatctgtgatggccagttttgctgataatccgttcgacaagctgcgctcccaggatgcggcaagagcttcggtagagcaggagcctgatgccggattagcgtcggagttgttttcgacgtcgtcggggtgggccagctctcagcaggtgtcccaagctcaaccggtgatgacccgttcggagaacgtggattggccggttgtcgcggagctagccagtacggccactgatgaggttgaggctgagatcagcaggtggagttccactcatgatggggtggcgacgctagacattcgccaggccatcgcggagcctgctattgcctcggcggtgtctacgtatgctgaccgacgccagatcgatgtaggggagacctggcctgatctggtacgccagcgataccgcaaggctgtgtgggatcagct

SEQ ID NO: 246 - DNA, 4903 bp, Propionibacterium acnes
  source 1..4903: mol_type = genomic DNA
gcgataccgcaaggctgtgtgggatcagctgttcgggatggggcggttgcagccgctgttcgaaatcagcgacgccgaaaacatcatcgtggtgggtaaccatgaggtggttgtcgaccacaacgatggttcccggtcaacgctgccgccggtggccgactcggatgccgagctggaatcccagatcgcccggatggcgaggaatgcgaccccgcggcgagccttcgacgccgatcacaccgatgtgacgatcatgcaccaacagaagttccgtatccacgcgatctcagcggaagtgtcattgcaaccgtcggtggtcatccgccaacatttgctcacccaaatcagtctgggggacctgtcccagcggggaatgatgccggtggaagtggcccggttcctcgatgaggcggtacaagctggcaagtccatcgtggtcgccggcgagcagggggcaggcaagacgacgtttttacgagcgttgatccacgccattccgatgcgggagcggttcgccacgttggagaccgatcaggagttgttcgctcatctgatgcctggccgggaaaacacgctggtgctgttcgcccgtgatggtaacggcgaggtggatccggcgactggcacccagcacggcgctatcgagatcgcccagctgattcctcctagtctgcgccaggcgttaactagggtcattgtcggtgaggtgcgcggcaatgaggcttcggccatgttccaggctatgcagtcggggactggcactatgagcagtatccactccccgcgagcctctgaggtgccgtcccggctagcccaaatgatttcgatgggcccggtctacgatctggatcaggccatgctgcagatcggtcattcgatcgactacatcgtctttgttcgtaagcgtgacctgcctgatgggagccggctgcgatttgttgagcagatccgttcagtctcgcctggtgattcgacaactcccagtcttggcgaggtgtacacggctgactcgtggacaggccagccgcttacgccactcatgcctggttcggccgccgacgagctgtctcatttcgcccgagacctggattactgcgaggcccactcatgaacactcctgcactaaccagcgccctcatcgtgaccgggttggggctgatcctggccatcgacgggctggtcccggcgccgcctcgacctggtgccccgctgagcccggcccagaggtgggctcggctcacccaccgtcccacaggagcggccgggcgtcgccgggatttgcgttgggggttggctgttctcgtcggcgtcgtgctgtttgtgctcaccgggtgggtggctgcgctggcgttgggccccatcattgtgttgttggcccccaccctgctgggggcggccccaccgaccgatattccgctgatggaggcgttggatcggtgggtgcgtcaggtcgctgcggtgctgccacaggggcgagacatcatcacagcggtgcggatctcacggccgcgggccccgaagctgatcgccgggtcggtggatcaactggtgtcccggttggatggccgtatggagccgagagaggcgttccagcggatggccgacgagctggactcggctgaggctgacgcggtgctggcctctctggcgttggcggccactcatccgcggggagcctcgacaacgttgaaggctattgctggcaacatccaacagcggttgaaagtgctgcggcaggtggaggctgagcggtctaagccgcgtaactcggtgcgccagatcacactggtcacgatcgccatgttcggggggctgctcgtgatcggacggtcgtttctggccccgctggcgacccctcccggtcaggtgctggtggccgtggcggtggtcatgtatgtcatcgcactagtgcagatgtatcggatggcgcggccccgtcgacgcacccggatcatggtcaggaggacccgatgaccattactgctttgtccctgctggccggggccatcgtcactgtcggactgctggtcatcgtggcagcgttccgcccagccccaggccctgacctggttgccgctctggaggtggtgtcgggtcgcacctcaagcgtcgccgagaacgtcgaccagacccggatcgggcggataggtcgcagcgtgacccgcacattccatgtgtcggtgtccccggccatgcgggccgcactgcgactccaaggcacgacccccgaagcgttgtacggtcgacgcctgatctgcgcactgatcggggcgatcctgccgtggctgctcaacgcggtagccatcgcggtaggggcgaattccccgaacctactcatcccttcggcgctgtgtgtggcgttagctggcgctggatggatgctgccggcagcacggttgaaggctgcggccgggcccaccaacgatgactcgttcgaagcgctgctggtattcatcgatttggtcgtgctggaacggctcgccaacgaaacctccgtcgacgcgctcaccaatgcggcaaacatgtcggactcgccgctattcgtccagatccgtcaagtcctcaaccgtgcctccctggaaaacgtcgacccgtggaacgggctagaccggctagccgaggacatcaaactgcccgaactcaccgatgtggtctccatcgcccgcctccaaaacgaaggcgcctccctcgtcgacagtttccgggcccgagtcgccgagttgcgcgacgcttacctgctgcgcctgcaacaagaatccaccgccatcacccagcggcttggtttgtggacgatcctgcaagccggctcggtcatgctcatcttgctgggggcggccgccctcacactcatcacagccggataaaccgacatcgtgtcgagcccccatatgggccgcgaacctttcataatgatgcctgtaagcaccacaatattgatcacaacctaacaatgaaggagaaatcatgatgaccgatctcgacctggctaaaaaacagatcacctggctggcggcgcacctgcgttcccggatcgttgacgagcgtggcggtggtagctctaccgtggagacactgatttggattggtgtcatcgtggcgctggtgattggtgtgggcgtcggggtgacggcctatatcaggtcgaagatgcctcactgacgacgatgcgtagcaggttcacaactgatcagcgtggcggtggtagcgcgtcggtggggatgctcctgctgatgcctgcgatcatgctgctggcattcggtgggatcgaggtcgggatgtggtgtcacgcccatcagtcgaccatcgcggcagcccaaagcgccgcggaggctcagcgtgtcgtccatccggtcccggggtcggcacaggaggcagcctcgcagatcactagtcatggcggggtgcgtgatacccggatatcggtcagtgatgacggggccactgtcacggtgaccgtggtgggccgggccccatcgatgctggggctgcatcttccggctgtgtcgtcgacagcgtcgatgcccaaggagcgcctgtcgtgaggcgaagtgagcgcggtggagcaagtctaagcgtcgaggtgctcatgtgggcgccgatcgcgctggtgatcatcgggtttgttgtgggtatcggccggatgtcgatggcccaggacgcggtgagtggcgcggctggtgctgcggcccgtgcggcgtcgttggagcgtgatggacagtcggctcagtctgcggcgcagcaggcggcgtcggcgaacctgtcgtccggtgggctggcatgtgcgccgagtgtgagcgtggacacgtcagtgtttgcccgtcctgccgggcaggcgggcacggttcacgccacggtcacgtgtgtcacctcgctgggtcttgggttcgggtcccggacggtgcacgcaacggggtctgccccggtagacacctatcgggaaaggagaggctgagatggcccgtgatgagcgtggtggcggctcggtgtcggtgtggatgctgctcatggtgccggtgattctggtcatggccggcctggtttttgacgggtcccgtcagatatcggcaacccaggcggcccaggacgcggcggttgcggcatcccgcgccggaactgatgcggcagcgacaccgcagcttgctggccacgacggggcggccgtagcagtccaagcggcccgccaggcactatctgctgccggggtggacgggtcggtgcaggaggacgggtcgaccatcacggtgaccacgtctcaaagtcggccgacagtgttcctgtcagcgatcggaatcagccaggtgaccgggcatgggcaggcccatgctcagcttgtgggaccgggagaacgcccatgacagtgatacgtcgtatcggtgccctggtggcactgctggtggtgatagccggcttaccggccgggctcgtggccgcaggcgccccgctagtaccctcgggcctgtcatgggcccatgtgcggcatctgttggttaccccagacatgaccgggtcggtgctggtgtggctggtcagcctcatcggctggatcgggtgggcatggttcgccctggccgtcgcagccgaagcggtgacgatgctctcagggcagcggctgcactggcacatgcccggccctcgcctagtgcgccgagtggcagccggtcttctcattgccgcgttcgcggccgcaccggcagccacaagcacggctcacgccgccgaggccacccatgtggcggtcgccgcccaggctggaccggcacacgcggcccccgcccaggacagccccgccaccacctctcaggccccggacgcctccaccactccgaaaatctggaagacctacacggtgcgggccaacgactacctgtggaagatcgccgagcactactacggtgacggcgcc

SEQ ID NO: 247 - DNA, 4612 bp, Propionibacterium acnes
  source 1..4612: mol_type = genomic DNA
gcgataccgcaaggctgtgtgggatcagctgtgccgctcccccgacatggcagacagcaccctgcggactgactgacactgtggcgccgcggaggtctcccgcggcgtccgctggggcgagtgcatgcctgtcagctcatcttttatcgtcatgtttccccttgtcagagcggtctttgcaaagtgacaacgtcaggggtcttgacgacaacatcctcgacaacatcgtggcggtggtctgtgtcttgtcagttcaacgcaccggggaaagaggcaccgctgatgttcaccaccacaaacaccctcaacgatgagtgggaccagattcgcgccactgagatcgattggcatgactgccctgaactgatgcactgcatcgacgttgatgatgtgttggccgtcattcctgccgcccccgacgccatcttgggctacctcattgcccgggctcagggcggtgacgagttggccacccgcactatcatccaagcgttcacaggcaagcttattttgatggccacggccaccaaggtgcgccgtactaatgacggcttcaatgatctgttggcgggtctgtgggagacgatcatcacgtacccgttggatcgtcgccctgacaagatcgctgcgaacctcatcctcgacacgttgcaccgggttacccggttttggcgtgctgattcccccgatgaggaagaggctcacggtctggtgcccttccctgacactctcatcgccccagagcccgatgaggacgtcacagctagccaggccatcgccttggcggtggaccgcaactggattaccgaggacctagcccgcctcatgagccatatttactgtgacggtatgactggagctgatgcgggtcgtctgcatggctgcgctccagctacggtgcgatctcgatgccgtgatggtcgggccgtgttgcagcgcaacgccgagacgatcctggccgtctgctgatccctctcttgctcatgcctgccgccaccctacctctacctgctagaaacatagccatgtctccagcaacgcatctagcgtatcttctagcaattgatctagctatcatatagctgatgatctagctatcatatagctgtgtctccagcccaaaggacagcccaatggcatgcttgccacaggaaggtgcgtcagcctcccgaaatactggaaggagctttaccgtgcaggacatgacctcgaccagaccgattgaccgatccccgttcgaccgcactattgcggtgtggaaccacaaaggcggcacgttcaagacgtccgtcgtggcgaacctgggatacctgttcgccgccggtggcaacaaggtgttgatggtcgacatggacccccaggccaatctcgacattgacttcggtatacccgcgggagaacgtgaacggggcatgggattagccgaggcgctacgtgaggggacggcccttcccccaccgcagcatctcagcgaaaaccttcacctggtcagtggcggcgctgctctcaacgagttcaccgaccccgcatccttagcggccatcatcgagcgggtcaccaccgcacgctacgacctgctagctcaggcccttgccccgctggcctgggactatgacctcatcttcatcgactccgggccggcccaaactctgctgtcccagaccatccttggagtagcccgctggctggtagtgcccacccgcaccgataacgcctcaatcactggcctcgtcgacgttcaagacgccatcgacggggttgcctcctgcaaccctgaccttcaactactcggcgttgtcctagccggcgtgggggcccgggccacccggatcgccgcagataaacgccacgccatcgacacagtgctgggggcaggaaccgttttcgatgcggtcatccactactccgagaaggtgtccgtgctcgcacgccagcagggcaagaccgtcgccgagctagccaacgagtaccacaacacccagcccgcctacacctacctagctaaaggccagaacatccccaacgtcgccaaggcagccgtcagcatcgaaactgattatctgaggctggccaccgagatcagcgaccgcatgttcaccagcgacgagcaggagcctgatcatgactgacgatccgactccatccgagcagaacaaccccaccagcgacgacatgcgcttggccgaagaatgggccaacagcggccgcacagtgggagccctgccgcgccgtcaacggcctcagcgacccacaccccgcaccaccagccaaccccctgtctcgtcccctgacacaccggctccgaaaaaaccccagaagacccccaccagccagcctggccgtcaacggatcaacgtcaccgtctacgttgtgcccgaactccatgagcggctgcgctcccgatcggcggcgacgggggtgacggtctcggatctggtggtgcatgcgttagcgttcgtcgccgatcatgcgggggaggcgatcgccgatgatctgcgcgtcgagacgggccccggcatgggggccggactgttcgatgtgaccccatcgcggccagtaggggtcgccaaaacccagctgggggtgcgaatgacccgccacaacaaggatggtttggaccagctgacccggacgagtggagcccgtgaccgcagccatcttgtgtctgtcgccgtgcgcgactatctcgactccaaccctgtaaagaaaggccgacatgtccgctgatgaaactcctgccgcccggggtgggcgacgctttgatacgaccgtcaagcccaggcgccgtcccatgcttatcgccgccggtatcgccatcgtgatagtcggcgcgctcctcatcactcagttgattcgctccgcccaaaccgagcatcgcgtgctggaagtccacgccgatgtggctcgcggcgaggtcatccgtgacaccgatctggtatcggtgactgtcggccaggtcgacaacgtatcaacggttcccgcagaccagctcgactcactggtcggcaaacgcgccacggcagatcttcgagccggatcactcttgcctgctggggctatcggcccggccgatgtcgttccagctccgggcaagtcgctggtcgggctgaagctagccgccggacagatccctatcggagaccttgctgccgggacgaagctgcgcctgatccagacgtcggcacccagcggctcatccaccaccactgatagcagcaccaataccgatggccagtcgtgggaggcaacaatggcgaccggcaccaaaaagaccgagcaggtcaccttgatcaacgccgaagtgaactcgcgtgatgccgcccggatcgcccaactgacgtcacagggccgtatcgccgtagtgaaggatccgatccgatgagcaccattgttttgaccagcgtctcgggagccccaggggtcaccacgacagcgatcgggctgggcagggtctggccacaatcgagcctggtcgtcgaggatgacacccaccacgccatgctggcgggctacctgcgagcctcccagcacgccgaaccgaacctggccgcagtggcgaacctgacgtcgactccaaccaacgcccaaacggtgtgggaatctatcgccagacccctacccaccgatgacccagtcggcgggatgcgacgcaaaggcatcctcggcccgcccacgccgtggtctcgcgcaggcatcgacccccgatggggattcatgctggccctgtggcggcaactggaggaggctggcatcgacaccatcatcgatttgggtcgcctagccacaccactgacctcaacgccacacctgatcgccgcacccatcgtcgaggacgccgacatgatcttggtgatgatcgaggcgacactacgcgacatcgccggcgcccgcacgatggtggagggactcgctgagcagatgaacttggccggcgcctaccgacgtctcggactgcttgtccaccgtggcggccaggcccgcggcgtcgccgagttcaatgacaaggagatcacctcggcgttacgactcccggtcatcggggccattacccatgacccggccggagccgccgaactctccgacggggtcgggcagcggttcgacaagtcacgtctggcccactcactatcaaaggtggcggccagcctcgtcgatgccataaacaagcgccacgctgatgacgaggaggatctgtgatggccagttttgctgataatccgttcgacaagctgcgctcccaggatgcggcaagagcttcggtagagcaggagcctgatgccggattagcgtcggagttgttttcgacgtcgtcggggtgggccagctctcagcaggtgtcccaagctcaaccggtgatgacccgttcggagaacgtggattggccggttgtcgcggagctagccagtacggccactgatgaggttgaggctgagatcagccggtggagttccactcatgatggggtggcgacgctagacattcgccaggccatcgcggagcctgctattgcctcggcggtgtctacgtatgctgaccgacgccagatcgatgtaggggagacctggcctgatctggtacgccagcgataccgcaaggctgtgtgggatcagct

SEQ ID NO: 248 - DNA, 4896 bp, Propionibacterium acnes
  source 1..4896: mol_type = genomic DNA
gcgataccgcaaggctgtgtgggatcagctgttcgggatggggcggttgcagccgctgttcgaaatcagcgacgccgaaaacatcatcgtggtgggtaaccatgaggtggttgtcgaccacaacgatggttcccggtcaacgctgccgccggtggccgactcggatgccgagctggaatcccagatcgcccggatggcgaggaatgcgaccccgcggcgagccttcgacgccgatcacaccgatgtgacgatcatgcaccaacagaagttccgtatccacgcgatctcagcggaagtgtcattgcaaccgtcggtggtcatccgccaacatttgctcacccaaatcagtctgggggacctgtcacatcgcggaatgatgccggtggaagtggcccggttcctcgatgaggcggtacaagctggcaagtccatcgtggtcgccggcgagcagggggcaggcaagacgacgtttttacgagcgttgatccacgccattccgatgcgggagcggttcgccacgttggagaccgatcaggagttgttcgctcatctgatgcctggccgggaaaacacgctggtgctgttcgcccgtgatggtaacggcgaggtggatccggcgactggcacccagcacggcgctatcgagatcgcccagctgattcctcctagcctgcgccaggcgttaactagggtcattgtcggtgaggtgcgcggcaatgaggcctcggccatgttccaggccatgcagtcgggtacaggcaccatgagcagtatccactccccgcgagcctctgaggtgccgtcccggctagcccaaatgatttcgatgggcccggtctacgatctggatcaggccatgctgcagatcggtcattcgatcgactacatcgtctttgttcgtaagcgtgacctgcctgatgggagccggctgcgatttgttgagcagatccgttcagtctcgcctggtgattcgacaactcccagtcttggcgaggtgtacacggctgactcgtggacaggccagccgcttacgccactcatgcctggttcggccgccgacgagctgtctcacttcgcccgagacctggattactgcgaggcccactcatgaacactcccgcactaaccagcgccctcatcgtgaccgggctagggctgatcctggccatcgacgggctggtcccggcgccgcctcgacctggtgccccgctgagcccggcccaaaggtgggctcggctcacccaccgtcccactggtgcggccgggcgtcgccgggatttgcgttgggggttggctgttcttgtcggtgtcgtgctgtttgtgctcaccgggtgggtggctgcgctggcgctgggccccatcattgtgttgttggcccccaccctgctgggggcggccccaccgaccgatattccgctgatggaggcgctggatcgctgggtgcgtcaggtcgctgcggtgctgccacaggggcgcgacatcatcacagcggtgcggatctcacggccgcgggccccgaagctgatcgccgggtcggtggatcaactggtgtcccggttggatggccgtatggagccgagggaggcgttccagcggatggccgacgagctggactcggctgaggctgacgcggtgctggcctcactagcgttggcggccactcatccgcggggagcctcgacaacgttgaaggctattgctggcaacatccaacagcggttgaaagtgctgcggcaggtggaggctgaacggtctaagccgcgtaactcggtgcgccagatcacactggtcacgatcgccatgttcggggggctgctcgtgatcggacggtcgtttctggccccgctggcgacccctcccggtcaggtgctggtggccgtggcggtggtcatgtatgtcatcgcactagtgcagatgtatcggatggcgcggccccgtcgacgcacccggatcatggtcaggaggacccgatgaccattactgctttgtccctgctagccggggccatcgtcactgtcggactgctggtcatcgtggcagcgttccgcccagccccaggccctgacctggttgccgctctggaggtggtgtcgggtcgcacctcaagcgtcgccgagaacgtcgaccagacccggatcgggcggataggtcgcagcgtgacccgcacattccatgtgtcggtgtccccggccatgcgggccgcactgcgactccaaggcacgacccccgaagcgttctacggtcgacgcctgatctgcgcactgatcggggcgatcctgccgtggctgctcaacgcggtagccatcgcggtaggggcgaattccccgaacctactcatcccttcggcgctgtgtgtggcgttagctggcgctggatggatgctgccggcagcacggttgaaggctgcggccgggcccaccaacgatgactcgttcgaagcgctgctggtattcatcgatttggtcgtgctggaacggctcgccaacgaaacctccgtcgacgcgctcaccaatgcggcaaacatgtcggactcgccgctattcgtccagatccgtcaagtcctcaaccgtgcctccctggaaaacgtcgacccgtggaacgggctagaccggctagccgaggacatcaaactgcccgaactcaccgatgtggtctccatcgcccgcctccaaaacgaaggcgcctccctcgtcgacagtttccgggcccgagtcgccgagttacgcgacgcctacctgctgcgcctgcaacaagaatccaccgccatcacccagcggcttggtttgtggacgatcctgcaagccggctcggtcatgctcatcttgctgggggcggccgccctcacactcatcacagccggataaaacgacaccgtgtcgagcccccatatgggccgcgaacctttcataatgatgcctgtaagcaccacaatattgatcacaacctaacaatgaaggagaaatcatgatgaccgatctcgacctggctaaaaaacagatcacctggctggcggcgcacctgcgttcccggatcgttgacgagcgtggcggtggtagctctaccgtggagacactgatttggattggtgtcatcgtggcgctggtgattggtgtgggcgtcggggtgacggcctatatcaggtcgaagatgcctcactgacgacgatgcgtagcaggttcacaactgatcagcgtggcggtggtagcgcgtcggtggggatgctcctgctgatgcctgcgatcatgctgctggcattcggtgggatcgaggtcgggatgtggtgtcacgcccatcagtcgaccatcgcggcagcccaaagcgccgcggaggctcagcgtgtcgtccatccggtcccggggtcggcacaggaggcagcctcgcagatcactagtcatggcggggtgcgtgatgcgcggatatcggtcagtgatgacggggccactgtcacggtgaccgtctcaggtcgggccccatcgatgctggggctgcatcttccggctgtgtcgtcgacagcgtcgatgcccaaggagcgcctgtcgtgaggcgaagtgagcgcggtggagcaagtctaagcgtcgaggtgctcatgtgggcgccgatcgcgctggtgatcatcgggtttgttgtgggtatcggccggatgtcgatggcccaggacgcggtgagtggcgcggcgggtgctgcggcccgtgcggcgtcgttggagcgtgatggacagtcggctcagtctgcggcgcagcaggcggcgtcggcgaacctgtcgtccggtgggctggcatgtgcgccgagtgtgagcgtggacacgtcagtgtttgcccgtcctgccgggcaggcgggcacggttcacgccacggtcacgtgtgtcacctcgctgggtcttgggttcgggtcccggacggtgcacgcaacggggtctgccccggtagacacctatcgggaaaggagaggctgagatggcccgcgatgagcgtggtggcggctcggtgtcggtgtggatgctgctcatggtgccggtgattctggtcatggccggcctggtttttgacgggtcccgtcagatatcggcaacccaggcggcccaggacgcggcggttgcggcatcccgcgccggaactgatgcggcagcgacaccgcagcttgctggccacgacggggcggccgtagcagtccaagcggcccgccaggcactatctgctgccggggtggacgggtcggtgcaggaggacgggtcgaccatcacggtgaccacgtctcaaagtcggccgacagtgttcctgtcagcgatcggaatcagccaggtaagggggcatgggcaggcccatgctcagcttgtgggaccgggagaacgcccatgacagtgatacgtcgtatcggtgccctggtggcactgctggtggtgatagccggcttaccggccgggctcgtggccgcaggcgccccgctagtaccctcgggcctgtcatgggcccatgtgcggcatctgttggttaccccagacatgaccgggtcggtgctggtgtggctggtcagcctcatcggctggatcgggtgggcatggttcgccctggccgtcgcagccgaagcggtgacgatgctctcagggcagcggctgcactggcacatgcccggccctcgcctagtgcgccgagtggcagccggtcttctcattgccgcgttcgcggccgcaccggcagccacaagcacggctcacgccgccgaggccacccatgtggcggtcgccgcccaggctggaccggcacacgcggcccccgcccaggacagccccgccaccacctctcaggccccggacgcctccaccactccgaaaatctggaagacctacacggtgcgggccaacgactacctgtggaagatcgccgagcactactacggtga

SEQ ID NO: 249 - DNA, 4892 bp, Propionibacterium acnes
  source 1..4892: mol_type = genomic DNA
gataccgcaaggctgtgtgggatcagctgttcgggatggggcggttgcagccgctgttcgaaatcagcgacgccgaaaacatcatcgtggtgggtaaccatgaggtggttgtcgaccacaacgatggttcccggtcaacgctgccgccggtggccgactcggatgccgagctggaatcccagatcgcccggatggcgaggaatgcgaccccgcggcgagccttcgacgccgatcacaccgatgtgacgatcatgcaccaacagaagttccgtatccacgcgatctcagcggaagtgtcattgcaaccgtcggtggtcatccgccaacatttgctcacccaaatcagtctgggggacctgtcacatcgcggaatgatgccggtggaagtggcccggttcctcgatgaggcggtacaagctggcaagtccatcgtggtcgccggcgagcagggggcaggcaagacgacgtttttacgagcgttgatccacgccattccgatgcgggagcggttcgccacgttggagaccgatcaggagttgttcgctcatctgatgcctggccgggaaaacacgctggtgctgttcgcccgtgatggtaacggcgaggtggatccggcgactggcacccagcacggcgctatcgagatcgcccagctgattcctcctagcctgcgccaggcgttaactagggtcattgtcggtgaggtgcgcggcaatgaggcctcggccatgttccaggccatgcagtcgggtacaggcaccatgagcagtatccactccccgcgagcctctgaggtgccgtcccggctagcccaaatgatttcgatgggcccggtctacgatctggatcaggccatgctgcagatcggtcattcgatcgactacatcgtctttgttcgtaagcgtgacctgcctgatgggagccggctgcgatttgttgagcagatccgttcagtctcgcctggtgattcgacaactcccagtcttggcgaggtgtacacggctgactcgtggacaggccagccgcttacgccactcatgcctggttcggccgccgacgagctgtctcacttcgcccgagacctggattactgcgaggcccactcatgaacactcccgcactaaccagcgccctcatcgtgaccgggctagggctgatcctggccatcgacgggctggtcccggcgccgcctcgacctggtgccccgctgagcccggcccaaaggtgggctcggctcacccaccgtcccactggtgcggccgggcgtcgccgggatttgcgttgggggttggctgttcttgtcggtgtcgtgctgtttgtgctcaccgggtgggtggctgcgctggcgctgggccccatcattgtgttgttggcccccaccctgctgggggcggccccaccgaccgatattccgctgatggaggcgctggatcgctgggtgcgtcaggtcgctgcggtgctgccacaggggcgcgacatcatcacagcggtgcggatctcacggccgcgggccccgaagctgatcgccgggtcggtggatcaactggtgtcccggttggatggccgtatggagccgagggaggcgttccagcggatggccgacgagctggactcggctgaggctgacgcggtgctggcctcactagcgttggcggccactcatccgcggggagcctcgacaacgttgaaggctattgctggcaacatccaacagcggttgaaagtgctgcggcaggtggaggctgaacggtctaagccgcgtaactcggtgcgccagatcacactggtcacgatcgccatgttcggggggctgctcgtgatcggacggtcgtttctggccccgctggcgacccctcccggtcaggtgctggtggccgtggcggtggtcatgtatgtcatcgcactagtgcagatgtatcggatggcgcggccccgtcgacgcacccggatcatggtcaggaggacccgatgaccattactgctttgtccctgctagccggggccatcgtcactgtcggactgctggtcatcgtggcagcgttccgcccagccccaggccctgacctggttgccgctctggaggtggtgtcgggtcgcacctcaagcgtcgccgagaacgtcgaccagacccggatcgggcggataggtcgcagcgtgacccgcacattccatgtgtcggtgtccccggccatgcgggccgcactgcgactccaaggcacgacccccgaagcgttctacggtcgacgcctgatctgcgcactgatcggggcgatcctgccgtggctgctcaacgcggtagccatcgcggtaggggcgaattccccgaacctactcatcccttcggcgctgtgtgtggcgttagctggcgctggatggatgctgccggcagcacggttgaaggctgcggccgggcccaccaacgatgactcgttcgaagcgctgctggtattcatcgatttggtcgtgctggaacggctcgccaacgaaacctccgtcgacgcgctcaccaatgcggcaaacatgtcggactcgccgctattcgtccagatccgtcaagtcctcaaccgtgcctccctggaaaacgtcgacccgtggaacgggctagaccggctagccgaggacatcaaactgcccgaactcaccgatgtggtctccatcgcccgcctccaaaacgaaggcgcctccctcgtcgacagtttccgggcccgagtcgccgagttacgcgacgcctacctgctgcgcctgcaacaagaatccaccgccatcacccagcggcttggtttgtggacgatcctgcaagccggctcggtcatgctcatcttgctgggggcggccgccctcacactcatcacagccggataaaacgacaccgtgtcgagcccccatatgggccgcgaacctttcataatgatgcctgtaagcaccacaatattgatcacaacctaacaatgaaggagaaatcatgatgaccgatctcgacctggctaaaaaacagatcacctggctggcggcgcacctgcgttcccggatcgttgacgagcgtggcggtggtagctctaccgtggagacactgatttggattggtgtcatcgtggcgctggtgattggtgtgggcgtcggggtgacggcctatatcaggtcgaagatgcctcactgacgacgatgcgtagcaggttcacaactgatcagcgtggcggtggtagcgcgtcggtggggatgctcctgctgatgcctgcgatcatgctgctggcattcggtgggatcgaggtcgggatgtggtgtcacgcccatcagtcgaccatcgcggcagcccaaagcgccgcggaggctcagcgtgtcgtccatccggtcccggggtcggcacaggaggcagcctcgcagatcactagtcatggcggggtgcgtgatgcgcggatatcggtcagtgatgacggggccactgtcacggtgaccgtctcaggtcgggccccatcgatgctggggctgcatcttccggctgtgtcgtcgacagcgtcgatgcccaaggagcgcctgtcgtgaggcgaagtgagcgcggtggagcaagtctaagcgtcgaggtgctcatgtgggcgccgatcgcgctggtgatcatcgggtttgttgtgggtatcggccggatgtcgatggcccaggacgcggtgagtggcgcggcgggtgctgcggcccgtgcggcgtcgttggagcgtgatggacagtcggctcagtctgcggcgcagcaggcggcgtcggcgaacctgtcgtccggtgggctggcatgtgcgccgagtgtgagcgtggacacgtcagtgtttgcccgtcctgccgggcaggcgggcacggttcacgccacggtcacgtgtgtcacctcgctgggtcttgggttcgggtcccggacggtgcacgcaacggggtctgccccggtagacacctatcgggaaaggagaggctgagatggcccgcgatgagcgtggtggcggctcggtgtcggtgtggatgctgctcatggtgccggtgattctggtcatggccggcctggtttttgacgggtcccgtcagatatcggcaacccaggcggcccaggacgcggcggttgcggcatcccgcgccggaactgatgcggcagcgacaccgcagcttgctggccacgacggggcggccgtagcagtccaagcggcccgccaggcactatctgctgccggggtggacgggtcggtgcaggaggacgggtcgaccatcacggtgaccacgtctcaaagtcggccgacagtgttcctgtcagcgatcggaatcagccaggtaagggggcatgggcaggcccatgctcagcttgtgggaccgggagaacgcccatgacagtgatacgtcgtatcggtgccctggtggcactgctggtggtgatagccggcttaccggccgggctcgtggccgcaggcgccccgctagtaccctcgggcctgtcatgggcccatgtgcggcatctgttggttaccccagacatgaccgggtcggtgctggtgtggctggtcagcctcatcggctggatcgggtgggcatggttcgccctggccgtcgcagccgaagcggtgacgatgctctcagggcagcggctgcactggcacatgcccggccctcgcctagtgcgccgagtggcagccggtcttctcattgccgcgttcgcggccgcaccggcagccacaagcacggctcacgccgccgaggccacccatgtggcggtcgccgcccaggctggaccggcacacgcggcccccgcccaggacagccccgccaccacctctcaggccccggacgcctccaccactccgaaaatctggaagacctacacggtgcgggccaacgactacctgtggaagatcgccgagcactactacggt

SEQ ID NO: 250 - DNA, 4617 bp, Propionibacterium acnes
  source 1..4617: mol_type = genomic DNA
gcgataccgcaaggctgtgtgggatcagctgtgccgctcccccgacatggcagacagcaccgttgcatgagaactgactgacactgtggcgccgcggaggtctcccgcggcgtccgctggggcgagtgcatgcctgtcagctcatcttttatcgtcatgtttccccttgtcagagcggtctttgcaaagtgacaacgtcaggggtcttgacgacaacatcctcgacaacatcgtggcggtggtctgtgtctcgtcagttcaacgcaccggggaaagaggcaccgctgatgttcaccaccacaaacaccctcaacgatgaatgggaccagattcgcgccactgagatcgattggcatgactgccctgaactgatgcactgcatcgacgttgatgatgtgttggccgtcattcctgccgcccccgacgccatcttgggctacctcattgcccgggctcagggcggtgacgagttggccacccgcactatcatccaagcgttcacaggcaagcttattttgatggccacggccaccaaggtgcgccgtactaatgacggcttcaatgatctgttggcgggtctgtgggagacgatcatcacgtacccgttagatcgtcgccctgacaagatcgctgcgaacctcatcctcgacacgttgcaccgggttacccggttttggcgtgctgattcccccgatgaggaagaggctcacggtctggtgcccttccctgacactctcatcgccccagagcccgatgaggacgtcacagctagccaggccatcgccttggcggtggaccgcaactggattaccgaggacctagcccgcctcatgagccatatttactgtgacggtatgactggagctgatgcgggtcgtctgcatggctgcgctccagctacggtgcgatctcgatgccgtgatggtcgggccgtgttgcagcgcaacgccgagacgatcctggccgtctgctgatccctctcttgctcatgcctgccgccaccctacccctacctgctagaaacatagccatgtctccagcaacgcatctagcgtatcttctagcaattgatctagctatcatatagctgatgatctagctatcatatagctgtgtctccagcccaaaggacagcccaatggcatgcttgccacaggaaggtgcgtcagcctcccgaaatactggaaggagctttaccgtgcaggacatgacctcgaccagaccgattgaccgatccccgttcgaccgcactattgcggtgtggaaccacaaaggcggcacgttcaagacgtccgtcgtggcgaacctgggatacctgttcgccgccggtggcaacaaggtgttgatggtcgacatggacccccaggccaatctcgacattgacttcggtatacccgcgggagaacgtgaacggggcatgggattagccgaggcgctacgtgaggggacggcccttcccccaccgcagcatctcagcgaaaaccttcacctggtcagtggcggcccggccctccacgagttcaccgaccccgcatccttagcggccatcctcgaccgagtcaccaccgcacgctacgacctgctagctcaggcccttgccccgctggcctgggactatgacctcatcttcatcgactccgggccggcccaaactctgctgtcccagaccatccttggagtagcccgctggctggtagtgcccacccgcaccgataacgcctcaatcactggcctcgtcgacgttcaagacgccatcgacggggttgcctcctgcaaccctgaccttcaactactcggcgttgtcctagccggcgtgggggcccgggccacccggatcgccgcagataaacgccacgccatcgacacagtgctgggggcaggaaccgttttcgatgcggtcatccactactccgagaaggtgtccgtgctcgcacgccagcagggcaagaccgtcgccgagctagccaacgactaccacaacacccagcccgcctacacctacctagctaaaggccagaacatccccaacgtcgccaaggcagccgtcagcatcgaaactgattatctgaggctggccaccgagatcagcgaccgcatgttcaccagcgacgagcaggagcctgatcatgactgacgatccgactccatccgagcagaacaaccccaccagcgacgacatgcgcttggccgaagaatgggccaacagcggccgcacagtgggagccctgccgcgccgtcaacggcctcagcgacccacaccccgcaccaccagccaaccccctgtctcgtcccctgacacaccggctccgaaaaaaccccagaagacccccaccagccagcctggccgtcaacggatcaacgtcaccgtctacgttgtgcccgaactccatgagcggctgcgctcccgatcggcggcgacgggggtgacggtctcggatctggtggtgcatgcgttagcgttcgtcgccgatcatgcgggggaggcgatcgccgatgatctgcgcgtcgagacgggccccggcatgggggccggactgttcgatgtgaccccatcgcggccagtaggggtcgccaaaacccagctgggggtgcgaatgacccgccacaacaaggatggtttggaccagctgacccggacgagtggagcccgtgaccgcagccatcttgtgtctgtcgccgtgcgcgactatctcgactccaaccctgtaaagaaaggccgacatgtccgctgatgaaactcctgccgcccggggtgggcgacgctttgatacgaccgtcaagcccaggcgccgtcccatgcttatcgccgccggtatcgccatcgtgatagtcggcgcgctcctcatcactcagttgattcgctccgcccaaaccgagcatcgcgtgctggaagtccacgccgatgtggctcgcggcgaggtcatccgtgacaccgatctggtatcggtgactgtcggccaggtcgacaacgtatcaacggttcccgcagaccagctcgactcactggtcggcaaacgcgccacggcagatcttcgagccggatcactcttacctgctggggctatcggcccggccgatgtcgttccagctccgggcaagtcgctggtcgggctgaagctagccgccggacagatccctatcggagaccttgctgccgggacgaagctgcgcctgatccagacgtcggcacccagcggctcatccaccaccactgatagcagcaccaataccgatggccagtcgtgggaggcaacaatggcgaccggcaccaaaaagaccgagcaggtcaccttgatcaacgccgaagtgaactcgcgtgatgccgcccggatcgcccaactgacgtcacagggccgtatcgccgtagtgaaggatccgatccgatgagcaccattgttttgaccagcgtctcgggagccccaggggtcaccacgacagcgatcgggctgggcagggtctggccacaatcgagcctggtcgtcgaggatgacacccaccacgccatgctggcgggctacctgcgagcctcccagcacgccgaaccgaacctggccgcagtggcgaacctgacgtcgactccaaccaacgcccaaacggtgtgggaatctatcgccagacccctacccaccgatgacccagtcggcgggctgcgacgcaaaggcatcctcggcccgcccacgccgtggtctcgcgcaggcatcgacccccgatggggattcatgctggccctgtggcggcaactggaggaggctggcatcgacaccatcatcgatttgggtcgcctagccacaccactgacctcaacgccacacctgatcgccgcacccatcgtcgaggacgccgacatgatcttggtgatgatcgaggcgacactacgcgacatcgccggcgcccgcacgatggtggagggactcgctgagcagatgaacttggccggcgcctaccgacgtctcggactgcttgtccaccgtggcggccaggcccgcggcgtcgccgagttcaatgacaaggagatcacctcggcgttacgactcccggtcatcggggccattacccatgacccggccggagccgcccaactctccgacggggtcgggcagcggttcgacaagtcacgtctggcccactcactatcaaaggtggcggccagcctcgtcgatgccataaacaagcgccacgctgatgacgaggaggatctgtgatggccagttttgctgataatccgttcgacaagctgcgctcccaggatgcggcaagagcttcggtagagcaggagcctgatgccggattagcgtcggagttgttttcgacgtcgtcggggtgggccagctctcagcaggtgtcccaagctcaaccggtgatgacccgttcggagaacgtggattggtcggttgtcgcggagctagccagtacggccactgatgaggttgaggctgagatcagccggtggagttccactcatgatggggtggcgacgctagacattcgccaggccatcgcggagcctgctattgcctcggcggtgtctacgtatgctgaccgacgccagatcgatgtaggggagacctggcctgatctggtacgccagcgataccgcaaggctgtgtgggatcagct

SEQ ID NO: 251 - DNA, 4613 bp, Propionibacterium acnes
  source 1..4613: mol_type = genomic DNA
gataccgcaaggctgtgtgggatcagctgtgccgctcccccgacatggcagacagcaccgttgcatgagaactgactgacactgtggcgccgcggaggtctcccgcggcgtccgctggggcgagtgcatgcctgtcagctcatcttttatcgtcatgtttccccttgtcagagcggtctttgcaaagtgacaacgtcaggggtcttgacgacaacatcctcgacaacatcgtggcggtggtctgtgtctcgtcagttcaacgcaccggggaaagaggcaccgctgatgttcaccaccacaaacaccctcaacgatgaatgggaccagattcgcgccactgagatcgattggcatgactgccctgaactgatgcactgcatcgacgttgatgatgtgttggccgtcattcctgccgcccccgacgccatcttgggctacctcattgcccgggctcagggcggtgacgagttggccacccgcactatcatccaagcgttcacaggcaagcttattttgatggccacggccaccaaggtgcgccgtactaatgacggcttcaatgatctgttggcgggtctgtgggagacgatcatcacgtacccgttagatcgtcgccctgacaagatcgctgcgaacctcatcctcgacacgttgcaccgggttacccggttttggcgtgctgattcccccgatgaggaagaggctcacggtctggtgcccttccctgacactctcatcgccccagagcccgatgaggacgtcacagctagccaggccatcgccttggcggtggaccgcaactggattaccgaggacctagcccgcctcatgagccatatttactgtgacggtatgactggagctgatgcgggtcgtctgcatggctgcgctccagctacggtgcgatctcgatgccgtgatggtcgggccgtgttgcagcgcaacgccgagacgatcctggccgtctgctgatccctctcttgctcatgcctgccgccaccctacccctacctgctagaaacatagccatgtctccagcaacgcatctagcatatcttctagcaattgatctagctatcatatagctgatgatctagctatcatatagctgtgtctccagcccaaaggacagcccaatggcatgcttgccacaggaaggtgcgtcagcctcccgaaatactggaaggagctttaccgtgcaggacatgacctcgaccagaccgattgaccgatccccgttcgaccgcactattgcggtgtggaaccacaaaggcggcacgttcaagacgtccgtcgtggcgaacctgggatacctgttcgccgccggtggcaacaaggtgttgatggtcgacatggacccccaggccaatctcgacattgacttcggtatacccgcgggagaacgtgaacggggcatgggattagccgaggcgctacgtgaggggacggcccttcccccaccgcagcatctcagcgaaaaccttcacctggtcagtggcggcccggccctccacgagttcaccgaccccgcatccttagcggccatcctcgaccgagtcaccaccgcacgctacgacctgctagctcaggcccttgccccgctggcctgggactatgacctcatcttcatcgactccgggccggcccaaactctgctgtcccagaccatccttggagtagcccgctggctggtagtgcccacccgcaccgataacgcctcaatcactggcctcgtcgacgttcaagacgccatcgacggggttgcctcctgcaaccctgaccttcaactactcggcgttgtcctagccggcgtgggggcccgggccacccggatcgccgcagataaacgccacgccatcgacacagtgctgggggcaggaaccgttttcgatgcggtcatccactactccgagaaggtgtccgtgctcgcacgccagcagggcaagaccgtcgccgagctagccaacgactaccacaacacccagcccgcctacacctacctagctaaaggccagaacatccccaacgtcgccaaggcagccgtcagcatcgaaactgattatctgaggctggccaccgagatcagcgaccgcatgttcaccagcgacgagcaggagcctgatcatgactgacgatccgactccatccgagcagaacaaccccaccagcgacgacatgcgcttggccgaagaatgggccaacagcggccgcacagtgggagccctgccgcgccgtcaacggcctcagcgacccacaccccgcaccaccagccaaccccctgtctcgtcccctgacacaccggctccgaaaaaaccccagaagacccccaccagccagcctggccgtcaacggatcaacgtcaccgtctacgttgtgcccgaactccatgagcggctgcgctcccgatcggcggcgacgggggtgacggtctcggatctggtggtgcatgcgttagcgttcgtcgccgatcatgcgggggaggcgatcgccgatgatctgcgcgtcgagacgggccccggcatgggggccggactgttcgatgtgaccccatcgcggccagtaggggtcgccaaaacccagctgggggtgcgaatgacccgccacaacaaggatggtttggaccagctgacccggacgagtggagcccgtgaccgcagccatcttgtgtctgtcgccgtgcgcgactatctcgactccaaccctgtaaagaaaggccgacatgtccgctgatgaaactcctgccgcccggggtgggcgacgctttgatacgaccgtcaagcccaggcgccgtcccatgcttatcgccgccggtatcgccatcgtgatagtcggcgcgctcctcatcactcagttgattcgctccgcccaaaccgagcatcgcgtgctggaagtccacgccgatgtggctcgcggcgaggtcatccgtgacaccgatctggtatcggtgactgtcggccaggtcgacaacgtatcaacggttcccgcagaccagctcgactcactggtcggcaaacgcgccacggcagatcttcgagccggatcactcttacctgctggggctatcggcccggccgatgtcgttccagctccgggcaagtcgctggtcgggctgaagctagccgccggacagatccctatcggagaccttgctgccgggacgaagctgcgcctgatccagacgtcggcacccagcggctcatccaccaccactgatagcagcaccaataccgatggccagtcgtgggaggcaacaatggcgaccggcaccaaaaagaccgagcaggtcaccttgatcaacgccgaagtgaactcgcgtgatgccgcccggatcgcccaactgacgtcacagggccgtatcgccgtagtgaaggatccgatccgatgagcaccattgttttgaccagcgtctcgggagccccaggggtcaccacgacagcgatcgggctgggcagggtctggccacaatcgagcctggtcgtcgaggatgacacccaccacgccatgctggcgggctacctgcgagcctcccagcacgccgaaccgaacctggccgcagtggcgaacctgacgtcgactccaaccaacgcccaaacggtgtgggaatctatcgccagacccctacccaccgatgacccagtcggcgggctgcgacgcaaaggcatcctcggcccgcccacgccgtggtctcgcgcaggcatcgacccccgatggggattcatgctggccctgtggcggcaactggaggaggctggcatcgacaccatcatcgatttgggtcgcctagccacaccactgacctcaacgccacacctgatcgccgcacccatcgtcgaggacgccgacatgatcttggtgatgatcgaggcgacactacgcgacatcgccggcgcccgcacgatggtggagggactcgctgagcagatgaacttggccggcgcctaccgacgtctcggactgcttgtccaccgtggcggccaggcccgcggcgtcgccgagttcaatgacaaggagatcacctcggcgttacgactcccggtcatcggggccattacccatgacccggccggagccgcccaactctccgacggggtcgggcagcggttcgacaagtcacgtctggcccactcactatcaaaggtggcggccagcctcgtcgatgccataaacaagcgccacgctgatgacgaggaggatctgtgatggccagttttgctgataatccgttcgacaagctgcgctcccaggatgcggcaagagcttcggtagagcaggagcctgatgccggattagcgtcggagttgttttcgacgtcgtcggggtgggccagctctcagcaggtgtcccaagctcaaccggtgatgacccgttcggagaacgtggattggccggttgtcgcggagctagccagtacggccactgatgaggttgaggctgagatcagccggtggagttccactcatgatggggtggcgacgctagacattcgccaggccatcgcggagcctgctattgcctcggcggtgtctacgtatgctgaccgacgccagatcgatgtaggggagacctggcctgatctggtacgccagcgataccgcaaggctgtgtgggatcag

SEQ ID NO: 252 - DNA, 5053 bp, Propionibacterium acnes
  source 1..5053: mol_type = genomic DNA
tggtgggcgctggaccaggtttgcggggcatgcgcgcatcggtgatcttggccgccaccaggtgttccagattgtccaagtgcccggagtcagaggtcagcagaagagtagtcacctcgaccgcggtggctgaggcgatctgagctgtgcggcggtcgtgatgggtggtgtcagtgctgacagctgtggtgggagcggatgccggggccgccgaacggaccagggcaacggggccgcatgcgactccgcacagcacgagggcaaggaagcctttggtggccatcgatccggtgtggggccagggacccacgttttcctgtgcctgttttttcttggccgaccaacggcgggacttagggttagcggatgcaccttctggggtgcatgctcgtctcaatcgcatcggtcacctccttcactggatgaagggaccaaggaggtgaccgatgtgcggtcgaacccgaaaaagttcaaacttttttctgggtctgcctcaagtacgacagaaggcctgcatcatcacggcgttgtggtagcagatcttgcgtcagcgcaaatgtatgggcctcgtaggagtagctcttaggtgggtcccggtggttgcggccagggcgagggtgtcgggtatgtgtagcgctagtcccgggttcgtggtgtgagggcttttgggtgctgacatgcactacccattgctagacgctgtgctgtggcatggctggacgtctagcagacgggttgacatcacctttaggctggcagcgcccgaggccgcaggccagaggaagcggacagcctaacgattgacgtccccctctcctttccccaacctcctggagtcgatgacccggagatagatcgatgtctatgcatctgtgcatcgatatacctatgtatctgtctgtggtttttagaggccactcccgtcgccccgggccgctcagcgataccgcaaggctgtgtgggatcagctgttccgctctcccgacatggcagacagcaccctgcggactgactgacactgtggcgccgcggaggtctcccgcggcgtccgctggggcgagtgcatgcctgtcagctcatcttttatcgtcatgtttccccttgtcagagcggtctttgcaaagtgacaacgtcaggggtcttgacgacaacatcctcgacaacatcgtggcggtggtctgtgtctcgtcagttcaacgcaccggggaaagaggcaccgctgatgttcaccaccacaaacaccctcaacgatgagtgggaccagattcgcgccactgagatcgattggcatgactgccctgaactgatgcactgcatcgacgttgatgatgtgttggccgtcattcctgccgcccccgacgccatcttgggctacctcattgcccgggctcagggcggtgacgagttggccacccgcactatcatccaagcgttcacaggcaagcttatcttgatggccacggccaccaaggtgcgccgtactaatgacggcttcaatgatctgttggcgggtctgtgggagacgatcatcacgtacccgttggatcgtcgccctgacaagatcgctgcgaacctcatcctcgacacgttgcaccgggttacccggttctggcgtgctgattcccccgatgaggaagaggctcacggtctggtgcccttccctgacactctcatcgccccagagcccgatgaggacgtcacagctagccaggccatcgccttggcggtggaccgcaactggattaccgaggacctagcccgcctcatgagccatatttactgtgacggtatgactggagctgatgcgggtcgtctgcatggctgcgctccagctacggtgcgatctcgatgccgtgatggtcgggccgtgttgcagcgcaacgccgagacgatcctggccgtctgctgatccctctcttgctcatgcctgccgccaccctacccctacctgctagaaacatagccatgtctccagcaacgcatctagcgtatcttctagcaattgatctagctatgtatatagctgatgatctagctaccatatagctgtgtctccagcccaaaggacagcccaatggcatgcttgccacaggaaggtgcgtcagcctcccgaaatactggaaggagctttaccgtgcaggacatgacctcgaccagaccgattgaccgatccccgttcgaccgcactattgcggtgtggaaccacaaaggcggcacgttcaagacgtccgtcgtggcgaacctgggatacctgttcgccgccggtggcaacaaggtgctgctggtcgacatggacccccaggccaatctcgacattgacttcggtatacccgcgggagaacgtgaacggggcatgggattagccgaggcgctacgtgaggggacggcccttcccccaccgcagcatctcagcgaaaaccttcacctggtcagtggcggcgctgctctcaacgagttcaccgaccccgcatccttagcggccatcctcgaccgagtcaccaccgcacgctacgacctgctagctcaggcccttgccccgctggcctgggactatgacctcatcttcatcgactccgggccggcacaaactctgctgtcccagaccatccttggagtagcccgctggctggtagtgcccacccgcaccgataacgcctcaatcactggcctcgtcgacgttcaagacgccatcgacggggttgcctcctgcaaccctgaccttcaactactcggcgttgtcctagccggcgtgggggcccgggccacccggatcgccgcagataaacgccacgccatcgacacagtgctgggggcaggaaccgttttcgatgcggtcatccactactccgagaaggtgtccgtgctcgcacgccagcagggcaagaccgtcgccgagctagccaacgagtaccacaacacccagcccgcctacacctacctagctaaaggccagaacatccccaacgtcgccaaggcagccgtcagcatcgaaactgattatctgaggctggccaccgagatcagcgaccgcatgttcaccagcgacgagcaggagcctgatcatgactgacgatccgactccatccgagcagaacaaccccaccagcgacgacatgcgcttggccgaagaatgggccaacagcggccgcacagtgggagccctgccgcgccgtcaacggcctcagcgacccacaccccgcaccaccagccaaccccctgtctcgtcccctgacacaccggctccgaaaaaaccccagaagacccccaccagccagcctggccgtcaacggatcaacgtcaccgtctacgttgtgcccgaactccatgagcggctgcgctcccgatcggcggcgacgggggtgacggtctcggatctggtggtgcatgcgttagcgttcgtcgccgatcatgcgggggaggcgatcgccgatgatctgcgcgtcgagacgggccccggcatgggggccggactgttcgatgtgaccccatcgcggccagtaggggtcgccaaaacccagctgggggtgcgaatgacccgccacaacaaggatggtttggaccagctgacccggacgagtggagcccgtgaccgcagccatcttgtgtctgtcgccgtgcgcgactatctcgactccaaccctgtaaagaaaggccgacatgtccgctgatgaaactcctgccgcccggggtgggcgacgctttgatacgaccgtcaagcccaggcgccgtcccatgcttatcgccgccggtatcgccatcgtgatagtcggcgcgctcctcatcactcagttgattcgctccgcccaaaccgagcatcgcgtgctggaagtccacgccgatgtggctcgcggcgaggtcatccgtgacaccgatctggtatcggtgactgtcggccaggtcgacaacgtatcaacggttcccgcagaccagctcgactcactggtcggcaaacgcgccacggcagatcttcgagccggatcactcttgcctgctggggctatcggcccggccgatgtcgttccagctccgggcaagtcgctggtcgggctgaagctagccgccggacagatccctatcggagaccttgctgccgggacgaagctgcgcctgatccagacctcggcaggcgggtcatccaccaccgggcagggcgccaccaataccgatattcaatcgtgggctgcgacgatggcgtccggcaccaaaagtactgagcaggtcaccttgatcaatgtggaggtggactcgcgtgatgcagctcggatcgcccagctgacatcgcagggccgtatcgctgtggtaaaggattcgactcgatgagcacaatcgttttgaccagtgtgtcgggagccccgggggtgaccacgacagcgattgggttggggcgggtctggccacagtccagtctggttgtcgaggacgacacccatcacgcgatgttggcgggctatctgcgagctgcccagcacgccgagccgaacttggccacggtggcaaatctgacggccactccgaccaatgcccaaaccgtgtgggaatccatcgccaggcctctgcccaccgatgatccggtcagcgggctgagacgcaaggccgtcctcggcccgcccacaccgtggtctcgtgcaggtatcgacccccggtggggattcatgctggccctgtggcggcagctggccgaggccgggatcgacaccatcatcgacctgggtcgcctagccacgccgctgacgtcaacgccacatctgatcgccacacccatcgtcgaggacgccgacatgatcctggtgatgatcgaggcgacgctacgcgatgtggccggcgcccacacgatggtcgaagggctggccgagcagatgaacctggccggggcccaccagcgcctcggactgttggtccaccgcggcggcgcggcccgcggggtcgctgagttcaccgacaaagagatcacgtcggcgttgcagctaccggtctgcgggtcgatagtccatgacccagtcgcggcagcccagctgtctgacggggtcgggcagcggttcgacaagtcgcgtct

SEQ ID NO: 253 - DNA, 4892 bp, Propionibacterium acnes
  source 1..4892: mol_type = genomic DNA
gataccgcaaggctgtgtgggatcagctgttcgggatggggcggttgcagccgctgttcgaaatcagcgacgccgaaaacatcatcgtggtgggtaaccatgaggtggttgtcgaccacaacgatggttcccggtcaacgctgccgccggtggccgactcggatgccgagctggaatcccagatcgcccggatggcgaggaatgcgaccccgcggcgagccttcgacaccgatcacaccgatgtgacgatcatgcaccaacagaagttccgtatccacgcgatctcagcggaagtgtcattgcaaccgtcggtggtcatccgccaacatttgctcacccaaatcagtctgggggacctgtcacatcgcggaatgatgccggtggaagtggcccggttcctcgatgaggcggtacaagctggcaagtccatcgtggtcgccggcgagcagggggcaggcaagacgacgtttttacgagcgttgatccacgccattccgatgcgggagcggttcgccacgttggagaccgatcaggagttgttcgctcatctgatgcctggccgggaaaacacgctggtgctgttcgcccgtgatggtaacggcgaggtggatccggcgactggcacccagcacggcgctatcgagatcgcccagctgattcctcctagcctgcgccaggcgttaactagggtcattgtcggtgaggtgcgcggcaatgaggcctcggccatgttccaggccatgcagtcgggtacaggcaccatgagcagtatccactccccgcgagcctctgaggtgccgtcccggctagcccaaatgatttcgatgggcccggtctacgatctggatcaggccatgctgcagatcggtcattcgatcgactacatcgtctttgttcgtaagcgtgacctgcctgatgggagccggctgcgatttgttgagcagatccgttcagtctcgcctggtgattcgacaactcccagtcttggcgaggtgtacacggctgactcgtggacaggccagccgcttacgccactcatgcctggttcggccgccgacgagctgtctcacttcgcccgagacctggattactgcgaggcccactcatgaacactcccgcactaaccagcgccctcatcgtgaccgggctagggctgatcctggccatcgacgggctggtcccggcgccgcctcgacctggtgccccgctgagcccggcccaaaggtgggctcggctcacccaccgtcccactggtgcggccgggcgtcgccgggatttgcgttgggggttggctgttcttgtcggtgtcgtgctgtttgtgctcaccgggtgggtggctgcgctggcgctgggccccatcattgtgttgttggcccccaccctgctgggggcggccccaccgaccgatattccgctgatggaggcgctggatcggtgggtgcgtcaggtcgctgcggtactgccacaggggcgagacatcatcacagcggtgcggatctcacggccgcgggccccgaagctgatcgccgggtcggtggatcaactggtgtcccggttggatggccgtatggagccgagggaggcgttccagcggatggccgacgagctggactcggctgaggctgacgcggtgctggcctcactagcgttggcggccactcatccgcggggagcctcgacaacgttgaaggctattgctggcaacatccaacagcggttgaaagtgctgcggcaggtggaggctgaacggtctaagccgcgtaactcggtgcgccagatcacactggtcacgatcgccatgttcggggggctgctcgtgatcggacggtcgtttctggccccgctggcgacccctcccggtcaggtgctggtggccgtggcggtggtcatgtatgtcatcgcactagtgcagatgtatcggatggcgcggccccgtcgacgcacccggatcatggtcaggaggacccgatgaccattactgctttgtccctgctagccggggccatcgtcactgtcggactgctggtcatcgtggcagcgttccgcccagccccaggccctgacctggttgccgctctggaggtggtgtcgggtcgcacctcaagcgtcgccgagaacgtcgaccagacccggatcgggcggataggtcgcagcgtgacccgcacattccatgtgtcggtgtccccggccatgcgggccgcactgcgactccaaggcacgacccccgaagcgttctacggtcgacgcctgatctgcgcactgatcggggcgatcctgccgtggctgctcaacgcggtagccatcgcggtaggggcgaattccccgaacctactcatcccttcggcgctgtgtgtggcgttagctggcgctggatggatgctgccggcagcacggttgaaggctgcggccgggcccaccaacgatgactcgttcgaagcgctgctggtattcatcgatttggtcgtgctggaacggctcgccaacgaaacctccgtcgacgcgctcaccaatgcggcaaacatgtcggactcgccgctattcgtccagatccgtcaagtcctcaaccgtgcctccctggaaaacgtcgacccgtggaacgggctagaccggctagccgaggacatcaaactgcccgaactcaccgatgtggtctccatcgcccgcctccaaaacgaaggcgcctccctcgtcgacagtttccgggcccgagtcgccgagttacgcgacgcctacctgctgcgcctgcaacaagaatccaccgccatcacccagcggcttggtttgtggacgatcctgcaagccggctcggtcatgctcatcttgctgggggcggccgccctcacactcatcacagccggataaaccgacaccgtgtcgagcccccatatgggccgcgaacctttcataatgatgcctgtaagcaccacaatattgatcacaacctaacaatgaaggagaaatcatgatgaccgatctcgacctggctaaaaaacagatcacctggctggcggcgcacctgcgttcccggatcgttgacgagcgtggcggtggtagctctaccgtggagacactgatttggattggtgtcatcgtggcgctggtgattggtgtgggcgtcggggtgacggcctatatcaggtcgaagatgcctcactgacgacgatgcgtagcaggttcacaactgatcagcgtggcggtggtagcgcgtcggtggggatgctcctgctgatgcctgcgatcatgctgctggcattcggtgggatcgaggtcgggatgtggtgtcacgcccatcagtcgaccatcgcggcagcccaaagcgccgcggaagctcagcgtgtcgtccatccggtcccggggtcggcacaggaggcagcctcgcagatcactagtcatggcggggtgcgtgatacccggatatcggtcagtgatgacggggccactgtcacggtgaccgtctcaggtcgggccccatcgatgctggggctgcatcttccggctgtgtcgtcgacagcgtcgatgcccaaggagcgcctgtcgtgaggcgaagtgagcgcggcggagcaagtctaagcgtcgaggtgctcatgtgggcgccgatcgcgctggtgatcatcgggtttgttgtgggtatcggccggatgtcgatggcccaggacgcggtgagtggcgcggctggtgctgcggcccgtgcggcgtcgttggagcgtgatggacagtcggctcagtctgcggcgcagcaggcggcgtcggcgaacctgtcgtccggtgggctggcatgtgcgccgagtgtgagcgtggacacgtcagtgtttgcccgtcctgccgggcaggcgggcacggttcacgccacggtcacgtgtgtcacctcgctgggtcttggattcgggtcccggacggtgcacgcaacggggtctgccccggtagacacctatcgggaaaggagaggctgagatggcccgcgatgagcgtggtggcggctcggtgtcggtgtggatgctgctcatggtgccggtgattctggtcatggccggcctggtttttgacgggtcccgtcagatatcggcaacccaggcggcccaggacgcggcggttgcggcatcccgcgccggaactgatgcggcagcgacaccgcagcttgctggccacgacggggcggccgtagcagtccaagcggcccgccaggcactatctgctgccggggtggacgggtcggtgcaggaggacgggtcgaccatcacggtgaccacgtctcaaagtcggccgacagtgttcctgtcagcgatcggaatcagccaggtaagggggcatgggcaggcccatgctcagcttgtgggaccgggagaacgcccatgacagtgatacgtcgtatcggtgccctggtggcactgctggtggtgatagccggcttaccggccgggctcgtggccgcaggcgccccgctagtaccctcgggcctgtcatgggcccatgtgcggcatctgttggttaccccagacatgaccgggtcggtgctggtgtggctggtcagcctcatcggctggatcgggtgggcatggttcgccctggccgtcgcagccgaagcggtgacgatgctctcagggcagcggctgcactggcacatgcccggcccccgcttggcgcgccgagtggcagccggtctcctcattgccgcgttcgcgggcgcaccggcggccacgtcggcagctcacgcggtcgaggccacccatgtggcggtcgcagctcaggcttccccggcccacgcggccggcacccaggacagccccgccaccacctctcaggccccggacgcctccaccactccgaaaatctggaagacctacacggtgcgggccaacgactacctgtggaagatcgccgagcactactacggt

SEQ ID NO: 254 - DNA, 4611 bp, Propionibacterium acnes
  source 1..4611: mol_type = genomic DNA
gcgataccgcaaggctgtgtgggatcagctgtgccgctcccccggcatgacaggcggcgccccacagattgacgacactgcggggctgcggaggtctcccgcggcgtccgctggggcgagtgcatgcctgtcagctcatcttttatcgtcatgtttccccttgtcagagcggtttttgcaaagtgacaacgtcaggggtcttgacgacaacatcctcgacaacatcgtggcggtggtctgtgtcttgtcagttcaacgcaccggggaaagaggcaccgctgatgttcaccaccacagctaccctcaacgatgaatgggaccagattcgcgccatcgagatcgattggcatgactgccccgaactgatgcactgcatcgacgttgatgatgtgttggccgtcattcctgccgcccccgacgccatcttgggctacctcattgcccgggctcagggcggtgacgagttggccacccgcactatcatccaagcgttcacaggcaagcttattttgatggccacggccaccaaggtgcgccgtactaatgacggcttcaatgatctgttggcggggttgtgggagacgatcatcacgtacccgttggatcgtcgccctgacaagatcgctgcgaacctcaccctcgacacgttgcaccgggttacccggttctggcgtgctgattcccccgatgaggaagaggctcacggtctggtgcccttccctgacactctcatcgccccagagcccgatgaggacgtcacagctagccaggccatcgccttggcggtggaccgcaactggattaccgaggacctagcccgcctcatgagccatatttactgtgacggtatgactggagctgatgcgggtcgtctgcatggctgcgctccagctacggtgcgatctcgatgccgtgatggtcgggccgtgttgcagcgcaacgccgagacgatcctggccgtctgctgatcctctcttgctcatgcctgccgccaccctacccctacctgctagaaacatagccatgtctccagcaacgcatctagcatatcttctagcaattgatctagctatgtatatagctgatgatctagctatcatatagctgtgtctccagcgcaaatgacagcccaatagcatgcttgccacaggaaggtgcgtcagcctcccgaaatactggaaggagctttaccgtgcaggacatgacctcgaccagaccgattgaccgatccccgttcgaccgcactattgcggtgtggaaccacaagggcggcacgttcaagacgtccgtcgtggcgaacctgggatacctgttcgccgccggtggcaacaaggtgctgctggtcgacatggacccccaagccaatctcgacattgacttcggtatacccgcgggagaacgtgaacggggcatgggattagccgaggcgctacgtgaggggacggcccttcccccaccgcagcatctcagcgagaaccttcacctggtcagtggcggcgctgctctcaacgagttcaccgaccccgcatccttagcggccatcctcgagcgggtcaccaccgagcgctacgacctgctagctcaggcccttgccccgctggcctgggactatgacctcatcttcatcgactccgggcctgcccaaactctgctgtcccagaccatccttggagtagcccgctggctggtagtgcccacccgcaccgataacgcctcaatcactggcctcgtcgacgttcaagacgccatcgacggggttgcctcctgtaaccctgaccttcaactactcggcgttgtcctagccggcgtgggggcccgggccacccggatcgccgcagataaacgccacgccatcgacacagtgctgggggcaggaaccgttttcgatgcggtcatccactactccgagaaggtgtccgtgctcgcacgccagcagggcaagaccgtcgccgagctagccaacgagtaccacaacacccagcccgcctacacctacctagctaaaggccagaacatccccaacgtcgccaaggcagccgtcagcatcgaaactgattatctgaggctggccaccgagatcagcgaccgcatgttcaccagcgacgagcaggagcctgatcatgactgacgatccgactccatccgagcagaacaaccccaccagcgacgacatgcgcttggccgaagaatgggccaacagcggccgcacagtgggagccctgccgcgccgtcaacggcctcagcgacccacaccccgcaccaccagccaaccccctgtctcgtcccctgacacaccggctccgaaaaaagcccagaagacccccaccagccagcctggccgtcaacggatcaacgtcaccgtctacgttgtgcccgaactccatgagcggctgcgctcccgatcggcggcgacgggagtgacggtctcggatctggtggtgcatgcgttagcgttcgtcgccgatcatgcgggggaggcgatcgccgatgatctgcgcgtcgagacgggccccggcatgggggccggactgttcgatgtgaccccatcgcggccagtaggggtcgccaaaacccagctgggggtgcgaatgacccgccacaacaaggatggtttggaccagctgacccggacgagtggagcccgtgaccgcagccatcttgtgtctgtcgccgtgcgcgactatctcgactccaaccctgtaaagaaaggccgacatgtccgctgatgaaactcctgccgcccggggtgggcgacgctttgatacgaccgtcaagcccaggcgccgtcccatgcttatcgccgccggtatcgccatcgtgatagtcggcgcgctcctcatcactcagttgattcgctccgcccaaaccgagcatcgcgtgctggaagtccacgccgatgtggctcgcggcgaggtcatccgtgacaccgatctggtatcggtgactgtcggccaggtcgacaacgtatcaacggttcccgcagaccagctcgactcactggtcggcaaacgcgccacggcagatcttcgagccggatcactcttgcctgctggggctatcggcccggccgatgtcgttccagctccgggcaagtcgctggtcgggctgaagctagccgccggacagatccctatcggagaccttgctgccgggacgaagctgcgcctgatccagacgtcggcacccagcggctcatccaccaccactgatagcagcaccaataccgatggccagtcgtgggaggcaacaatggcgaccggcaccaaaaagaccgagcaggtcaccttgatcaacgccgaagtgaactcgcgtgatgccgcccggatcgcccaactgacgtcacagggccgtatcgccgtagtgaaggatccgatccgatgagcaccattgttttgaccagcgtctcgggagccccaggggtcaccacgacagcgatcgggctgggcagggtctggccacaatcgagcctggtcgtcgaggatgacacccaccacgccatgctggcgggctacctgcgagcctcccagcacgccgaaccgaacctggccgcagtggcgaacctgacgtcgactccaaccaacgcccaaacggtgtgggaatctatcgccagacccctacccaccgatgacccagtcggcgggctgcgacgcaaaggcatcctcggcccgcccacgccgtggtctcgcgcaggcatcgacccccgatggggattcatgctggccctgtggcggcaactggaggaggctggcatcgacaccatcatcgatttgggtcgcctagccacaccactgacctcaacgccacacctgatcgccgcacccatcgtcgaggacgccgacatgatcttggtgatgatcgaggcgacactacgcgacatcgccggcgcccgcacgatggtggagggactcgctgagcagatgaacttggccggcgcccaccgacgtctcggactgcttgtccaccgtggcggccaggcccgcggcgtcgccgagttcaatgacaaggagatcacctcggcgttacgactcccggtcatcggggccattacccatgacccggccggagccgcccaactctccgacggggtcgggcagcggttcgacaagtcacgtctggcccactcactatcaaaggtggcggccagcctcgtcgatgccataaacaagcgccacgctgatgacgaggaggatctgtgacggccagttttgctgataatccgttcgacaagctgcgctcccaggatgcggcaagagcttcggtagagcaggagcctgatgccggattagcgtcggagttgttttcggcgtcgtcggggtgggccagctctcagcaggtgtcccaagctcaaccggtgatgacccgttcggagaacgtggattggccggttgtcgcggagctagccagtacggccactgatgaggttgaggctgagatcagccggtggagttccactcatgatggggtggcgacgctagacattcgccaggccatcgcggagcctgctattgcctcggcggtgtctacgtatgctgaccgacgccagatcgatgtaggggagacctggcctgatctggtacgccagcgataccgcaaggctgtgtgggatcagct

SEQ ID NO: 255 - DNA, 4345 bp, Propionibacterium acnes
  source 1..4345: mol_type = genomic DNA
ccggacagatccctatcggagaccttgctgtcgggacgaagctgcgcctgatccagacgtcggcacccagcggctcatccaccaccactgatagcagcaccaataccgatggccagtcgtgggaggcaacaatggcgaccggcaccaaaaagaccgagcaggtcaccttgatcaacgccgaagtgaactcgcgtgatgccgcccggatcgcccaactgacgtcacagggccgtatcgccgtagtgaaggatccgatccgatgagcaccattgttttgaccagcgtctcgggagccccaggggtcaccacgacagcgatcgggctgggcagggtctggccacaatcgagcctggtcgtcgaggatgacacccaccacgccatgctggcgggctacctgcgagcctcccagcacgccgaaccgaacctggccgcagtggcgaacctgacgtcgactccaaccaacgcccaaacggtgtgggaatctatcgccagacccctacccaccgatgacccagtcggcgggctgcgacgcaaaggcatcctcggcccgcccacgccgtggtctcgcgcaggcatcgacccccgatggggattcatgctggccctgtggcggcaactggaggaggctggcatcgacaccatcatcgatttgggtcgcctagccacaccactgacctcaacgccacacctgatcgccgcacccatcgtcgaggacgccgacatgatcttggtgatgatcgaggcgacactacgcgacatcgccggcgcccgcacgatggtggagggactcgctgagcagatgaacttggccggcgcctaccgacgtctcggactgcttgtccaccgtggcggccaggcccgcggcgtcgccgagttcaatgacaaggagatcacctcggcgttacgactcccggtcatcggggccattacccacgacccggccggagccgcccaactctccgacggggtcgggcagcggttcgacaagtcacgtctggcccactcactatcaaaggtggcggccagcctcgtcgatgccataaacaagcgccacgctgatgacgaggaggatctgtgatggccagttttgctgataatccgttcgacaagctgcgctcccaggatgcggcaagagcttcggtagagcaggagcctgatgccggattagcgtcggagttgttttcgacgtcgtcggggtgggccagctctcagcaggtgtcccaagctcaaccggtgatgacccgttcggagaacgtggattggccggttgtcgcggagctagccagtacggccactgatgaggttgaggctgagatcagcaggtggagttccactcatgatggggtggcgacgctagacattcgccaggccatcgcggagcctgctattgcctcggcggtgtctacgtatgctgaccgacgccagatcgatgtaggggagacctggcctgatctggtacgccagcgataccgcaaggctgtgtgggatcagctgttcgggatggggcggttgcagccgctgttcgaaatcagcgacgccgaaaacatcatcgtggtgggtaaccatgaggtggttgtcgaccacaacgatggttcccggtcaacgctgccgccggtggccgactcggatgccgagctggaatcccagatcgcccggatggcgaggaatgcgaccccgcggcgagccttcgacgccgatcacaccgatgtgacgatcatgcaccaacagaagttccgtatccacgcgatctcttcggaggtgtcgttgcaaccgtcggtggtcatccgccaacatttgctcacccaaatcagtctgggggacctgtcccagcggggaatgatgccggtggaagtggcccggttcctcgatgaggcggtacaagctggcaagtccatcgtggtcgccggcgagcagggggcaggcaagacgacgtttttacgagcgttgatccacgccattccgatgcgggagcggttcgccacgttggagaccgatcaggagttgttcgctcatctgatgcctggccgggaaaacacgctggtgctgttcgcccgtgatggtaacggcgaggtggatccggcgactggcacccagcacggcgctatcgagatcgcccagctgattcctcctagcctgcgccaggcgttaactagggtcattgtcggtgaggtgcgcggcaatgaggcttcggccatgttccaggctatgcagtcggggactggcactatgagcagtatccactccccgcgagcctctgaggtgccgtcccggctagcccaaatgatttcgatgggcccggtctacgatctggatcaggccatgctgcagatcggtcattcgatcgactacatcgtctttgttcgtaagcgtgacctgcctgatgggagccggctgcgatttgttgagcagatccgttcagtctcgcctggtgattcgacaactcccagtcttggcgaggtgtacacggctgactcgtggacaggccagccgcttacgccactcatgcctggttcggccgccgacgagctgtctcacttcgcccgagacctggattactgcgaggcccactgatgaacaccccagcgctgatagcagccctcatcgtgaccggcctgggactgatcatggccatcaacggcctgatcccggccacacccaaacccggcaccacgctgacgctgtcacagcggtgggcccgggccacccaccgcccagccggggcagccgggcgccgacgcgacctgcgctgggcgctggccggtctcgtcggcatcgtgctgttcgtcctcacaggttgggtcgctgccctggccctgggccccatcaccgtgctgctagcacccaccctgctgggggcggccccaccgaccgatattccgctgatggaggcgttggatcggtgggtgcgtcaggtcgctgcggtgctgccacaggggcgagacatcatcacagcggtgcggatctcacggccgcgggccccgaagctgatcgccgggtcggtggatcaactggtgtcccggttggatggccgtatggagccgagggaggcgttccagcggatggccgacgagctggactcggctgaggctgacgcggtgctggcctcactagcgttggcggccactcatccgcggggagcctcgacaacgttgaaggctattgctggcaacatccaacagcggttgaaagtgctgcggcaggtggaggctgagcggtctaagccgcgtaactcggtgcgccagatcacactggtcacgatcgccatgttcggggggctgctcgtgatcggacggtcgtttctggccccgctggcgacccctcccggtcaggtgctggtggccgtggcggtggtcatgtatgtcatcgcactagtgcagatgtatcggatggcgcggccccgtcgacgcacccggatcatggtcaggaggacccgatgaccattactgctttgtccctgctggccggggccatcgtcactgtcggactgctggtcatcgtggcagcgttccgcccagccccaggccctgacctggttgccgctctggaggtggtgtcgggtcgcacctcaagcgtcgccgagaacgtcgaccagacccggatcgggcggataggtcgcagcgtgacccgcacattccatgtgtcggtgtccccggccatgcgggccgcactgcgactccaaggcacgacccccgaagcgttctacggtcgacgcctgatctgcgcactgatcggggcgatcctgccgtggctgctcaacgcggtagccatcgcggtaggggcgaattccccgaacctactcatcccttcggcgctgtgtgtggcgttagctggcgctggatggatgctgccggcagcacggttgaaggctgcggccgggcccaccaacgatgactcgttcgaagcgctgctggtattcatcgatttggtcgtgctggaacggctcgccaacgaaacctccgtcgacgcgctcaccaatgcggcaaacatgtcggactcgccgctattcgtccagatccgtcaagtcctcaaccgtgcctccctggaaaacgtcgacccgtggaacgggctagaccggctagccgaggacatcaaactgcccgaactcaccgatgtggtctccatcgcccgcctccaaaacgaaggcgcctccctcgtcgacagtttccgggcccgagtcgccgagttgcgcgacgcctacctgctgcgcctgcaacaagaatccaccgccatcacccagcggcttggtttgtggacgatcctgcaagccggctcggtcatgctcatcttgctgggggcggccgccctcacactcatcacagccggataaaccgacatcgtgtcgagc

SEQ ID NO: 256 - DNA, 4249 bp, Propionibacterium acnes
  source 1..4249: mol_type = genomic DNA
gacgccggccaccccaactactccgacccacacggtgaccccagctccggcctctgccggccactcgaccagcgacgagcacccactccatacggataccgccgcagcggacaaggccagcaacgaggacgccctgtccccaatccaggtgggtttgaccgccagcgtcggactggtgctggtcgccggactgatcaccaccctcaaccgccgctaccggacccggttcacccgccagccccgcggcaaggccatgaccctgcccagcccggacgcccaaactgccgagatagcgctgcgcagcaccggggcgactgacactctgacgatcacctgcctcgaccaggcgctccgcgcgatcggcgcatggtgccaccactgcgggcacccgctgccacccctgctggccgcccgcgtcgatgacgaccggatcgacctgctgctatcccaggcggcccccgaccatcccgaggcggtggagctggccgccgacggatcggtgtggaccctcaccgccgaccggatcgacgacctgctagcccacaccgatgacaaccaagcggctccgtggccgtctctggtcacactgggacgcgacgacgacggcgcccacatcctcatcgacttggaagccgcaggaaccttgcacctgatcgccgatgacgaccaggtcgacgcggccctcgccgcgatcgccgtggaactggccacctgcgactggtccgacgaagtcaacgtcaccctcgtcggccaggtgtgcccgggcctagaagacgcactagagtctccgaccctgacccgcgccaccgacgtggacaccctcctcaccaccctagaagctcgcgccgacgaccagcgacacatcctcaccgaaggaaaccccctcgccgctcaccgagccgaccccgccatctccgacgggttcgacgccgaagtgatcctcctcgacaccgaactcaccgaagaccaccgcaaccgcctcgccagcctcgtcgaggctcttccccgcgtgtcagtcgccgcggtaacaaccagccccaccagctcagacgaatggtccctcaccctgacaggtgacccactagccgccgacctggctcccctcggctggcacatccacccccaaaccctctcccccgacctgtacaaccgcatggttgaactactcgccaactccgccgccgcagactacgaacccgccagctggtggaaccacgacgccgacgacgagcccaccaccgaccccaccaacgaggaagaatctaccccgagcaggcgagcccgcccgaatatccgcctgaccaccctgaccggcggcatcgacctatccagcgtcgacatcgacgacatcatcgacgaagccaaccaggccctcgacaacaccgaccagaccaccaaccaggttcgcgtcgacaccaaccaacccggcaccgacacccccttccccatcgacgacatcgacccgctgagctccgaccatccggtcctatccatcatcggccaccccgacatcacaggtgccactggaaccgttgggcgctccccgtggcgctgccaacagttggctctctacatcgctgagcatccgggagcatcgggggcgactatcgccgatgatttggggctatcagcgtcgacggtgcgctcgattgctacacacctgcgacactggttgggagccgacgatgccggggtggcttacatgccggcggcgacgcgcggctaccggctcgatgagcggatcgtcacagatgtggacctgatcgacgctgctgtggccggggcaggcattaacaccgctgagacggccacactggtggccattttgaagctgggccgcggacgggtcttcgctggggttcctgactcggaacttcgccagttcagggcgtcgatgtaccacgtggaggcccgcatcgtcgatgctgccctccaagtgacagaccgggccctggaagccggggacctggggctggcccggtgggcgttgacccaagggctactggtgtctcccgatcatgaggacctggtcaccggttgtctgcgcaccgagtaccaggccggcaacatggacaaggtttccgagctggtcgatcacctgtcggctaccgcacgacgcctgggcgtcgatttgagcgccgacaccacccggatcatcgactccgttattacccatacacgcaggagagcatcatgatctcccgttgcactcatctccgtcaggaaggttcctatgcaccattatcgtcttggtatcggcactgccctcatcgcggtagcagccgtggccggctgtcgctcaacagactcgacacccacaccacctccatcccgtgtctccgccacgacatcagcgagctctaccctcagcccgaccccgtcagccggagcgatcagtgccgccgacgccgaaaacatctaccgcaccgtccaagctaacaagatcgcactgtacaaaaagggtggcctggcacccggggaacccgcacccgcgacactgtcgaactacgccaccggccaggctctcaccgactacatgacctacatgcaccaaatctcggggcagggcatcaaaatcacatcggggaactcctcggttaccgcggtgcgggagaaaaagggtgataccacctaccccgaagccgctatcgccttggaatcgtgcgaagacgacagttcgattcgtaccgtggaccgccacggaaaggctgatcatggacgcattttccatgtcgacagttggtatgcccgcgataagaagggcaccgtcaagatgatcgcattcaactcaacggaggtccccacatgcgacgtcaagtaatcaccgcggccgtactgggcctggccctggccaccacctccctgcccgccctcgcaggcggcggcgacttgaacggcagtgtggacacggatggccctggttacgatgtgcgtactgaggtggattaccatcacaccaccggtggtgcgggtgggggtgccacgacagggggccatcatgggggcaaaacccacggtgatggtgaaggtgaggctattgatgggcgttctcgcgccgatgccgaagccgaactagacgaagccgaccgtaaccaggacttgacttgtgatgtcttgctcccaccggcgccgaataccccagccggccaggaatgggcgaaagaatgcaatcccccagcgaaaaaggggcagaaggccaccccgaagcccgatccggtgttagtgggccgtcacgcggccttgcagctcacccttcccggcgcggcccctcgtatcgatccgtcccccgaccttaaccggtggcactcggcagcagtgggccaggctttgtggttgtcggttgatgaccccaccgccactacgcagaaatcgatcacgtttatgggccaggttgtctcgttgagcgccaaacgtaacggtttgtcgtttgatatgggtgatggtcatgtcgtgcactgtgatgccacgacgacatggacggagtcggtggaaccggggaccccctcacccacgtgcggttacacctaccaacaggcagccccggccgggggctataaggtcaccgcaatcacgtcgtgggatgtgacctggtcggtactaggacacacgggcacagtccacatccagaaggccggtgggcagatgcttccggtcggcgagttggagtctgttgttacacggcgatgactcctgatagtccgacgctgtatgaggtgttggaggtctgccctgatgccactgatgaccagatcaagacggcgtggcgtcgtgccgcgaaagtgactcaccctgatgccggtggcactagtgaggcgttcgcggccgcccggcacgcctgggaggtgttgtctgatcctgcccggcgcaccgcctacgatgccgacctggcgggggaggatgatcccgacgacgaagccgccgacgccttcgacgttgatccgttcacggcatggccctggtgcgccccgtacatcgacgccacccccaccctgcgccacacctgccccggcacgatcaaggccatcgtggtcgccatcgccgggatcatggccggaatcggctggcaggaagcgctggaggccgtggtgtcgccgccggggtttctgggggcgtgctggatagtctcagtgccggttgtcgtcgcagtgacatggctggcagcggtgacgggtctggcatttttcaccatggcggccatctggtgtggatggtcgttgataggtggtgcgttgctgtggggccagacgtc

SEQ ID NO: 257 - DNA, 1918 bp, Propionibacterium acnes
  source 1..1918: mol_type = genomic DNA
aaccgtcatctggcgtggagtagcgagctgatgcaggaaggcaatttgtacggccttcccgaggaagacccgttgtggggcgaggccgtggagctggtagcgggacttatcccctctgtgcgggcgatgtggtcgcacgatgggcagaccgtgactgtgtcggctggccggcgggtggcgacactggggatgccgatgcggggatggcgtggtatcgagatgcgcggctggaatccagtgggcgccgatacgtggtggatcgttgaccaggtgggtagttggctggtcgatcaggatgagccgatggtcgttgacgggagggtgctccatgaggcgtgggaacggtcgcagatggtccgttcaggccgctgagaaaaaatttaggtccgccctgcatatcggggcctcttcataccttcaaaagtgtgaagggaatacagactcttcgactggaattaaaatggtatatggcgtgtccggtccgcacccagctccacgatgcgccataggggagccataacttcaccaatcgtatacgatatgagtgtaggtgagcatctaccggtggccgacagtcagatacaagcatgggcggatgaagcagaagctgattatgacctcagcatgcttccgccgtctcgacgtggtcgcccaccggtggggaggggcccgggcactgtggtccctgtgcgcttcgacgcggacactctcaaggcgttgtcacaacgagcccctgacgaaggattgaccacgcgttctgacgcgatccgtgctgcggttaaccagtggctcggcctcggctcgtaaacattatcggcgcgacaaccttactgatgacgctgttggttacgccgtagagcacatcttgtactcgtgggcgctcgacgatgctgatgatcctcgttgctggatgatgattcggtgttgacccagctggcctcctcatggagctagttatcctcatctacgacgatggctatgaactcctgatccacgccatgaaagcccgccctcagtatctgagctacttcgctatctagtgttgttgggcgagttgaactcaacttttctccgacgcaagcgccaataaaaggctgatccatccgaataccaccaaacacggctgacgtgtggaacagattcagcaagacagggtgcggtgctcgggtgcgttggggagatgaggatattcaggcttctggcgggatgtggcttgatgacgtccaggatcaccggttcggttttgaaggtgccttgcattaatgtcgacagggtcgtacgactcgaggactggatcgaccagcccgttgcgtctgaagaacttcatccaccccggtggagctccggccgcgtactggtgcaacggatcattagcatgggtagcgtgagtatgccttcgatcgtggtcagtgctgtcatcatccaaggttctgacgggcggcttctcactgtccgtaaacgaggcaccgaggcattcatgctgccaggcggcaagccggagcccggcgaggactcgcgtcaggcagtagtccgggaagtgcacgaagagctcggcgtcgcattgtcttccgacgacctgcgtcgggtgggagtgttcaccacgcgagcagcgaatgaggccggccatcaggtggtggcgacgattttcacccacaccccggttgcggtgagtgagccagctgctgagatcgagcagattcgttggctcgattggagtgtcgacgccctgcctgatgacctggccccgctgctggtcgaggcagtcatcccgtggctgcggcgccgtatccggtcggtcgctgtattcacgggtgcgaaggatggaaccgaccctcattatcgtgtcgaagcaaccgccttgggccggggtctcgcacacgccgggatcaccctggtttatggcggcgggaaggtcggg

SEQ ID NO: 258 - DNA, 4029 bp, Propionibacterium acnes
  source 1..4029: mol_type = genomic DNA
gacgatcatcacgtacccgttagatcgtcgccctgacaagatcgctgcgaacctcatcctcgacacgttgcaccgggttacccggttttggcgtgctgattcccccgatgaggaagaggctcacggtctggtgcccttccctgacactctcatcgccccagagcccgatgaggacgtcacagctagccaggccatcgccttggcggtggaccgcaactggattaccgaggacctagcccgcctcatgagccatatttactgtgacggtatgactggagctgatgcgggtcgtctgcatggctgcgctccagctacggtgcgatctcgatgccgtgatggtcgggccgtgttgcagcgcaacgccgagacgatcctggccgtctgctgatccctctcttgctcatgcctgccgccaccctacccctacctgctagaaacatagccatgtctccagcaacgcatctagcgtatcttctagcaattgatctagctatcatatagctgatgatctagctatcatatagctgtgtctccagcccaaaggacagcccaatggcatgcttgccacaggaaggtgcgtcagcctcccgaaatactggaaggagctttaccgtgcaggacatgacctcgaccagaccgattgaccgatccccgttcgaccgcactattgcggtgtggaaccacaaaggcggcacgttcaagacgtccgtcgtggcgaacctgggatacctgttcgccgccggtggcaacaaggtgttgatggtcgacatggacccccaggccaatctcgacattgacttcggtatacccgcgggagaacgtgaacggggcatgggattagccgaggcgctacgtgaggggacggcccttcccccaccgcagcatctcagcgaaaaccttcacctggtcagtggcggcccggccctccacgagttcaccgaccccgcatccttagcggccatcctcgaccgagtcaccaccgcacgctacgacctgctagctcaggcccttgccccgctggcctgggactatgacctcatcttcatcgactccgggccggcccaaactctgctgtcccagaccatccttggagtagcccgctggctggtagtgcccacccgcaccgataacgcctcaatcactggcctcgtcgacgttcaagacgccatcgacggggttgcctcctgcaaccctgaccttcaactactcggcgttgtcctagccggcgtgggggcccgggccacccggatcgccgcagataaacgccacgccatcgacacagtgctgggggcaggaaccgttttcgatgcggtcatccactactccgagaaggtgtccgtgctcgcacgccagcagggcaagaccgtcgccgagctagccaacgactaccacaacacccagcccgcctacacctacctagctaaaggccagaacatccccaacgtcgccaaggcagccgtcagcatcgaaactgattatctgaggctggccaccgagatcagcgaccgcatgttcaccagcgacgagcaggagcctgatcatgactgacgatccgactccatccgagcagaacaaccccaccagcgacgacatgcgcttggccgaagaatgggccaacagcggccgcacagtgggagccctgccgcgccgtcaacggcctcagcgacccacaccccgcaccaccagccaaccccctgtctcgtcccctgacacaccggctccgaaaaaaccccagaagacccccaccagccagcctggccgtcaacggatcaacgtcaccgtctacgttgtgcccgaactccatgagcggctgcgctcccgatcggcggcgacgggggtgacggtctcggatctggtggtgcatgcgttagcgttcgtcgccgatcatgcgggggaggcgatcgccgatgatctgcgcgtcgagacgggccccggcatgggggccggactgttcgatgtgaccccatcgcggccagtaggggtcgccaaaacccagctgggggtgcgaatgacccgccacaacaaggatggtttggaccagctgacccggacgagtggagcccgtgaccgcagccatcttgtgtctgtcgccgtgcgcgactatctcgactccaaccctgtaaagaaaggccgacatgtccgctgatgaaactcctgccgcccggggtgggcgacgctttgatacgaccgtcaagcccaggcgccgtcccatgcttatcgccgccggtatcgccatcgtgatagtcggcgcgctcctcatcactcagttgattcgctccgcccaaaccgagcatcgcgtgctggaagtccacgccgatgtggctcgcggcgaggtcatccgtgacaccgatctggtatcggtgactgtcggccaggtcgacaacgtatcaacggttcccgcagaccagctcgactcactggtcggcaaacgcgccacggcagatcttcgagccggatcactcttacctgctggggctatcggcccggccgatgtcgttccagctccgggcaagtcgctggtcgggctgaagctagccgccggacagatccctatcggagaccttgctgccgggacgaagctgcgcctgatccagacgtcggcacccagcggctcatccaccaccactgatagcagcaccaataccgatggccagtcgtgggaggcaacaatggcgaccggcaccaaaaagaccgagcaggtcaccttgatcaacgccgaagtgaactcgcgtgatgccgcccggatcgcccaactgacgtcacagggccgtatcgccgtagtgaaggatccgatccgatgagcaccattgttttgaccagcgtctcgggagccccaggggtcaccacgacagcgatcgggctgggcagggtctggccacaatcgagcctggtcgtcgaggatgacacccaccacgccatgctggcgggctacctgcgagcctcccagcacgccgaaccgaacctggccgcagtggcgaacctgacgtcgactccaaccaacgcccaaacggtgtgggaatctatcgccagacccctacccaccgatgacccagtcggcgggctgcgacgcaaaggcatcctcggcccgcccacgccgtggtctcgcgcaggcatcgacccccgatggggattcatgctggccctgtggcggcaactggaggaggctggcatcgacaccatcatcgatttgggtcgcctagccacaccactgacctcaacgccacacctgatcgccgcacccatcgtcgaggacgccgacatgatcttggtgatgatcgaggcgacactacgcgacatcgccggcgcccgcacgatggtggagggactcgctgagcagatgaacttggccggcgcctaccgacgtctcggactgcttgtccaccgtggcggccaggcccgcggcgtcgccgagttcaatgacaaggagatcacctcggcgttacgactcccggtcatcggggccattacccatgacccggccggagccgcccaactctccgacggggtcgggcagcggttcgacaagtcacgtctggcccactcactatcaaaggtggcggccagcctcgtcgatgccataaacaagcgccacgctgatgacgaggaggatctgtgatggccagttttgctgataatccgttcgacaagctgcgctcccaggatgcggcaagagcttcggtagagcaggagcctgatgccggattagcgtcggagttgttttcgacgtcgtcggggtgggccagctctcagcaggtgtcccaagctcaaccggtgatgacccgttcggagaacgtggattggtcggttgtcgcggagctagccagtacggccactgatgaggttgaggctgagatcagccggtggagttccactcatgatggggtggcgacgctagacattcgccaggccatcgcggagcctgctattgcctcggcggtgtctacgtatgctgaccgacgccagatcgatgtaggggagacctggcctgatctggtacgccagcgataccgcaaggctgtgtgggatcag

SEQ ID NO: 259 - DNA, 4013 bp, Propionibacterium acnes
  source 1..4013: mol_type = genomic DNA
acccttccagcccagcaccacccactacaccgacacgatccacgaagctgaaaccgaacctcccatccccgtccgaaacatcaacgaactcatcaaccccaccaaccatgcatgaacgcacgatcgcctaccggccagccttcctgcgcgacgtgaagcggctcaaaaacaagcactacaacatgaacacacactcaaatgggcggtaaggtcacgaagtcgacgtggctgcctcacggatggcttcggcgagctcttggggtcgactccacatgggccagtggccggttggcagatccatcgcggtgaagttggtcaggtgcgcgacggcgctgaacatcggattgcctgctgcggccagctcgaggacctggacgctgggaatggagcagcagatcaacgtggttagtacatcatggcgagcgctattggacagcgcgacccgtgcccgggccacttgcgcgggttcaggaaccgcccgtgcccggaaccggtcaaggtgctcgttgctgaggccctctaaactggcctgcttgccgagagtatcgaagtcaggaagtggcagctcagctgtttcctcaggtagatctggtgcgaaggcacctccatcgctcatgggaccggagtccacccagacgatccgatggaccaactctgggtgcctgtctacaactaggctcaccggcccgttcgcgccactgtgtcccaccaggaccgcatcgccgcccatctcgtccaggatggctgagatggcgtcagcttggtcgtcgagcgtgcgcgtagtgcgctgggtgtcctccggatcgagacctggcagcgtcagccccacggctcgactgccagcagtgttcaataactcgactacctcgtcccaagcccaggctccgagccagtaaccaggaacgaggacgataggccgatgctggtcaggtcgcgatgttgaagtcatggagacatagttgcacagtgcgcggacaagggagtggcactatttctggcatgaatttagatctgggtgtccggtgaggcgatcagaacgcctccatgtactgtccgagtgtctaggatgcagcggacacagtcgagcagctggctcacaagtttccaggtgtccttctgcccctatgagggaagtcggctgctctcgcaacctttgagggctgctctggggtcggaaccagttacagatcgttcaagttccgggaactaccgccggtcacgctgattgattcccgggcgatctcgcttctgacgacagtggtcggtgaccgagaggagtcctactctgaccccgctgctgcggtgagtaaatcacgggcgtcccggatccggccacccgtccaagtgccagccagcttgatcggctaggcatcgtcaaggagcgacgatgaggtgatgatgcgatgtgagcgcaccgcgaagtgaggtataaagaagccttcccgggcgcatgcgtcgcccaggaaggccaggttggcccctggacggctgaatggttgggcggatcaggctgtagcggagacgtgcagtacctcgtaggcgatggcgttggttgggctctggtctgcatcgtggctactgagttcgacgaggatgacggtccaggtggtgatgtcgacggcggtgacgcgggcgatggtggaatcagtggatgctgcaaggaagtcggcggttatgtcttcgatgcagtgggacggagcagtgctggtgggcaggggcacggtcttgacggtcaggcttcgggcagcagagtaatcggcggttccgttaacaagctggtggacggtccagtcctggatcgggtgccggccgaagtcgcgtacgatagccgagtaaccaagttcgccccagcagaactggcgcatcccctctatgtcgcgccagacgtagaagggcgcgtaggagttctggggtgcgcctttgaccttttcttggatgaggtaggccttgaactccagtccatggtagccgtccatgaggtgtccagtctggatgacgcggtcgcggatgatctgcatgtcatagtcggtgggcagggtgatctgatattgcatggcgtacatcagcggttctccttggtttcgtgggagtaggtcgtgggggtgacgggttcctgccaatcgatggttgacaagtcgtcggcggcttgttggtaggtaaggtggatcattggctgtttgagtgcagcgccatgccagtgtctctggccggcgtcgatccagatggattcgcccttggtcaggtgctggggtgcttgtccttcaatatggaccagggcaacgccgcccgtgacgtagaggccctgtcccttggggtgtgtgtgcctcagcggcaaacgtgacggcgtgggcggcacgcccggcgtcttccgtggcacgatcggccggatccatggcggcgcgcagctgctgttctgcagccaggcgtccaggtcacggcgggcagcatcgacacccagggcagcctcgacggcttcagggctacgacgctggccgggctggttgaccgcagaccactggtgccgggcgtcgtccagatcatggccggcggcgtcgatgagggcggtggtggcttcggcgcagcatcgcctgatccactccgaacgtgacaggccagctgtctcggcggcactgtcaatgcgcgccaggagagatttcatgggcgctcatctgtagcctccagataggcgttgatgtagcgcagagcctgatccgtcatgtcgatggcggctgcctcggcagacgacacaacgggctgtggatgataagaccacccaacatagacggcgaacatcaatttctcgacagctttcatgaggtccccggcggcaaccgcatccgcctcatcatccgaggagaaccacttcaggtctgaacggctgtacatagcccctaggtcctgatgtgggtcgaggtccttggaatgatggaagttcctacacacccatcgccaaagacctcaacatggacaacgctaccttcaccactccctcatctgtgaagagccagtttatgcacggtgttgaaagaggcgtcggtctacgacgaatgcgggttaatggtcttgcggtgtggggcgctgggcgatggcatcgagaacgcgtgagtgggtggcgatccattcggccgcgtcggggttgatgttgcgggcgacggtgtcgatcgctgttacgtagtgggcaagcctgcgaatctcagcttgttggtcagggtgagcgctgatgaggggctcttgatgggaggcgcggttacggacgtggcggatgagctccacgttttcctcgaagtcgcgtcggctacgccccgggtagtgaggcatacctccgttacgtaagtcagtgagagctttccatacggttgcttccaggcgcggggtgagcagaaagcgccagttgtccagtgacagactcgccacgatctgatcaggggtcgcatcgagcctcgcgcgccgcagtcgcttctcggccctgtcgacgttacgcgggaaaccaccgagccgatagctcggggattcccaccaacgccgtatgccagtatcggcgctcaggcgcacgtcaatgaagtttctcaggagtacctcgacatggctgatgtcttccaagaacgctttcgagatgcgggtgttccacacgtaccacgcatcgactggttcgatccggtagcggctgagcctggcgggtgagaaccactcctgcaacgtctcacgactcaccgtgggagcgtggtaagattgatgacgataggcctcgggaaggtcaatgccgcgaaatatcggtatacccccgaggtcattgtcttgcccaggcccctcctcgcatacttgcggggcgtcattggctgccgtcatctcgtctcttcccggtacgtggctgtccatgttcacgggcaggtacggcaatgaggttcccgcacacaaacctctaccaaacatacgctggcaagccgttgcatgagacgacgcctccgcccgccacaccaacggtcaccgccacggccacggtgacggtgaccgtg

SEQ ID NO: 260 - DNA, 3969 bp, Propionibacterium acnes
  source 1..3969: mol_type = genomic DNA
gacgatcatcacgtacccgttagatcgtcgccctgacaagatcgctgcgaacctcatcctcgacacgttgcaccgggttacccggttttggcgtgctgattcccccgatgaggaagaggctcacggtctggtgcccttccctgacactctcatcgccccagagcccgatgaggacgtcacagctagccaggccatcgccttggcggtggaccgcaactggattaccgaggacctagcccgcctcatgagccatatttactgtgacggtatgactggagctgatgcgggtcgtctgcatggctgcgctccagctacggtgcgatctcgatgccgtgatggtcgggccgtgttgcagcgcaacgccgagacgatcctggccgtctgctgatccctctcttgctcatgcctgccgccaccctacccctacctgctagaaacatagccatgtctccagcaacgcatctagcatatcttctagcaattgatctagctaccatatagctgatgatctagctatcatatagctgtgtctccagcccaaaggacagcccaatggcatgcttgccacaggaaggtgcgtcagcctcccgaaatactggaaggagctttaccgtgcaggacatgacctcgaccagaccgattgaccgatccccgttcgaccgcactattgcggtgtggaaccacaaaggcggcacgttcaagacgtccgtcgtggcgaacctgggatacctgttcgccgccggtggcaacaaggtgttgatggtcgacatggacccccaggccaatctcgacattgacttcggtatacccgcgggagaacgtgaacggggcatgggattagccgaggcgctacgtgaggggacggcccttcccccaccgcagcatctcagcgaaaaccttcacctggtcagtggcggcccggccctccacgagttcaccgaccccgcatccttagcggccatcctcgaccgagtcaccaccgcacgctacgacctgctagctcaggcccttgccccgctggcctgggactatgacctcatcttcatcgactccgggccggcccaaactctgctgtcccagaccatccttggagtagcccgctggctggtagtgcccacccgcaccgataacgcctcaatcactggcctcgtcgacgttcaagacgccatcgacggggttgcctcctgcaaccctgaccttcaactactcggcgttgtcctagccggcgtgggggcccgggccacccggatcgccgcagataaacgccacgccatcgacacagtgctgggggcaggaaccgttttcgatgcggtcatccactactccgagaaggtgtccgtgctcgcacgccagcagggcaagaccgtcgccgagctagccaacgactaccacaacacccagcccgcctacacctacctagctaaaggccagaacatccccaacgtcgccaaggcagccgtcagcatcgaaactgattatctgaggctggccaccgagatcagcgaccgcatgttcaccagcgacgagcaggagcctgatcatgactgacgatccgactccatccgagcagaacaaccccaccagcgacgacatgcgcttggccgaagaatgggccaacagcggccgcacagtgggagccctgccgcgccgtcaacggcctcagcgacccacaccccgcaccaccagccaaccccctgtctcgtcccctgacacaccggctccgaaaaaaccccagaagacccccaccagccagcctggccgtcaacggatcaacgtcaccgtctacgttgtgcccgaactccatgagcggctgcgctcccgatcggcggcgacgggggtgacggtctcggatctggtggtgcatgcgttagcgttcgtcgccgatcatgcgggggaggcgatcgccgatgatctgcgcgtcgagacgggccccggcatgggggccggactgttcgatgtgaccccatcgcggccagtaggggtcgccaaaacccagctgggggtgcgaatgacccgccacaacaaggatggtttggaccagctgacccggacgagtggagcccgtgaccgcagccatcttgtgtctgtcgccgtgcgcgactatctcgactccaaccctgtaaagaaaggccgacatgtccgctgatgaaactcctgccgcccggggtgggcgacgctttgatacgaccgtcaagcccaggcgccgtcccatgcttatcgccgccggtatcgccatcgtgatagtcggcgcgctcctcatcactcagttgattcgctccgcccaaaccgagcatcgcgtgctggaagtccacgccgatgtggctcgcggcgaggtcatccgtgacaccgatctggtatcggtgactgtcggccaggtcgacaacgtatcaacggttcccgcagaccagctcgactcactggtcggcaaacgcgccacggcagatcttcgagccggatcactcttacctgctggggctatcggcccggccgatgtcgttccagctccgggcaagtcgctggtcgggctgaagctagccgccggacagatccctatcggagaccttgctgccgggacgaagctgcgcctgatccagacgtcggcacccagcggctcatccaccaccactgatagcagcaccaataccgatggccagtcgtgggaggcaacaatggcgaccggcaccaaaaagaccgagcaggtcaccttgatcaacgccgaagtgaactcgcgtgatgccgcccggatcgcccaactgacgtcacagggccgtatcgccgtagtgaaggatccgatccgatgagcaccattgttttgaccagcgtctcgggagccccaggggtcaccacgacagcgatcgggctgggcagggtctggccacaatcgagcctggtcgtcgaggatgacacccaccacgccatgctggcgggctacctgcgagcctcccagcacgccgaaccgaacctggccgcagtggcgaacctgacgtcgactccaaccaacgcccaaacggtgtgggaatctatcgccagacccctacccaccgatgacccagtcggcgggctgcgacgcaaaggcatcctcggcccggccacgccgtggtctcgcgcaggcatcgacccccgatggggattcatgctggccctgtggcggcaactggaggaggctggcatcgacaccatcatcgatttgggtcgcctagccacaccactgacctcaacgccacacctgatcgccgcacccatcgtcgaggacgccgacatgatcttggtgatgatcgaggcgacactacgcgacatcgccggcgcccgcacgatggtggagggactcgctgagcagatgaacttggccggcgcctaccgacgtctcggactgcttgtccaccgtggcggccaggcccgcggcgtcgccgagttcaatgacaaggagatcacctcggcgttacgactcccggtcatcggggccattacccatgacccggccggagccgcccaactctccgacggggtcgggcagcggttcgacaagtcacgtctggcccactcactatcaaaggtggcggccagcctcgtcgatgccataaacaagcgccacgctgatgacgaggaggatctgtgatggccagttttgctgataatccgttcgacaagctgcgctcccaggatgcggcaagagcttcggtagagcaggagcctgatgccggattagcgtcggagttgttttcgacgtcgtcggggtgggccagctctcagcaggtgtcccaagctcaaccggtgatgacccgttcggagaacgtggattggccggttgtcgcggagctagccagtacggccactgatgaggttgaggctgagatcagccggtggagttccactcatgatggggtggcgacgctagacattcgccaggccatcgcggagcctgctattgcctcggcggtgtctacgtatgctgaccgacgccagatcgat

SEQ ID NO: 261 - DNA, 4012 bp, Propionibacterium acnes
  source 1..4012: mol_type = genomic DNA
acccttccagcccagcaccacccactacaccgacacgatccacgaagctgaaaccgaacctcccatccccgtccgaaacatcaacgaactcatcaaccccaccaaccatgcatgaacgcacgatcgcctaccggccagccttcctgcgcgacgtgaagcggctcaaaaacaagcactacaacatgaacacacactcaaatgggcggtaaggtcacgaagtcgacgtggctgcctcacggatggcttcggcgagctcttggggtcgactccacatgggccagtggccggttggcagatccatcgcggtgaagttggtcaggtgcgcgacggcgctgaacatcggattgcctgctgcggccagctcgaggacctggacgctgggaatggagcagcagatcaacgtggttagtacatcatggcgagcgctattggacagcgcgacccgtgcccgggccacttgcgcgggttcaggaaccgcccgtgcccggaaccggtcaaggtgctcgttgctgaggccctctaaactggcctgcttgccgagagtatcgaagtcaggaagtggcagctcagctgtttcctcaggtagatctggtgcgaaggcacctccatcgctcatgggaccggagtccacccagacgatccgatggaccaactctgggtgcctgtctacaactaggctcaccggcccgttcgcgccactgtgtcccaccaggaccgcatcgccgcccatctcgtccaggatggctgagatggcgtcagcttggtcgtcgagcgtgcgcgtagtgcgctgggtgtcctccggatcgagacctggcagcgtcagccccacggctcgactgccagcagtgttcaataactcgactacctcgtcccaagcccaggctccgagccagtaaccaggaacgaggacgataggccgatgctggtcaggtcgcgatgttgaagtcatggagacatagttgcacagtgcgcggacaagggagtggcactatttctggcatgaatttagatctgggtgtccggtgaggcgatcagaacgcctccatgtactgtccgagtgtctaggatgcagcggacacagtcgagcagctggctcacaagtttccaggtgtccttctgcccctatgagggaagtcggctgctctcgcaacctttgagggctgctctggggtcggaaccagttacagatcgttcaagttccgggaactaccgccggtcacgctgattgattcccgggcgatctcgcttctgacgacagtggtcggtgaccgagaggagtcctactctgaccccgctgctgcggtgagtaaatcacgggcgtcccggatccggccacccgtccaagtgccagccagcttgatcggctaggcatcgtcaaggagcgacgatgaggtgatgatgcgatgtgagcgcaccgcgaagtgaggtataaagaagccttcccgggcgcatgcgtcgcccaggaaggccaggttggcccctggacggctgaatggttgggcggatcaggctgtagcggagacgtgcagtacctcgtaggcgatggcgttggttgggctctggtctgcatcgtggctactgagttcgacgaggatgacggtccaggtggtgatgtcgacggcggtgacgcgggcgatggtggaatcagtggatgctgcaaggaagtcggcggttatgtcttcgatgcagtgggacggagcagtgctggtgggcaggggcacggtcttgacggtcaggcttcgggcagcagagtaatcggcggttccgttaacaagctggtggacggtccagtcctggatcgggtgccggccgaagtcgcgtacgatagccgagtaaccaagttcgccccagcagaactggcgcatcccctctatgtcgcgccagacgtagaagggcgcgtaggagttctggggtgcgcctttgaccttttcttggatgaggtaggccttgaactccagtccatggtagccgtccatgaggtgtccagtctggatgacgcggtcgcggatgatctgcatgtcatagtcggtgggcagggtgatctgatattgcatggcgtacatcagcggttctccttggtttcgtgggagtaggtcgtgggggtgacgggttcctgccaatcgatggttgacaagtcgtcggcggcttgttggtaggtaaggtggatcattggctgtttgagtgcagcgccatgccagtgtctctggccggcgtcgatccagatggattcgcccttggtcaggtgctggggtgcttgtccttcaatatggaccagggcaacgccgcccgtgacgtagaggccctgtcccttggggtgtgtgtgcctcagcggcaaacgtgacggcgtgggcggcacgcccggcgtcttccgtggcacgatcggccggatccatggcggcgcgcagctgctgttctgcagccaggcgtccaggtcacggcgggcagcatcgacacccagggcagcctcgacggcttcagggctacgacgctggccgggctggttgaccgcagaccactggtgccgggcgtcgtccagatcatggccggcggcgtcgatgagggcggtggtggcttcggcgcagcatcgcctgatccactccgaacgtgacaggccagctgtctcggcggcactgtcatgcgcgccaggagagatttcatgggcgctcatctgtagcctccagataggcgttgatgtagcgcagagcctgatccgtcatgtcgatggcggctgcctcggcagacgacacaacgggctgtggatgataagaccacccaacatagacggcgaacatcaatttctcgacagctttcatgaggtccccggcggcaaccgcatccgcctcatcatccgaggagaaccacttcaggtctgaacggctgtacatagcccctaggtcctgatgtgggtcgaggtccttggaatgatggaagttcctacacacccatcgccaaagacctcaacatggacaacgctaccttcaccactccctcatctgtgaagagccagtttatgcacggtgttgaaagaggcgtcggtctacgacgaatgcgggttaatggtcttgcggtgtggggcgctgggcgatggcatcgagaacgcgtgagtgggtggcgatccattcggccgcgtcggggttgatgttgcgggcgacggtgtcgatcgctgttacgtagtgggcaagcctgcgaatctcagcttgttggtcagggtgagcgctgatgaggggctcttgatgggaggcgcggttacggacgtggcggatgagctccacgttttcctcgaagtcgcgtcggctacgccccgggtagtgaggcatacctccgttacgtaagtcagtgagagctttccatacggttgcttccaggcgcggggtgagcagaaagcgccagttgtccagtgacagactcgccacgatctgatcaggggtcgcatcgagccccgcgcgccgcagtcgcgcctcggccctggcgacgttacgcgggaaaccaccgagccgatagctcggggattcccaccaacgccgtatgccagtatcggcgctcaggcgcacgtcaatgaagtttctcaggagtacctcgacatggctgatgtcttccaagaacgctttcgagatgcaggtgttccacacgtaccacgcatcgactggttcgatccggtagcggctgagcctggcgggtgagaaccactcctgcaacgtctcacgactcaccgtgggagcgtggtaagattgatgacgataggcctcgggaaggtcaatgccgcgaaatatcggtatacccccgaggtcattgtcttgcccaggcccctcctcgcatacttgcggggcgtcattggctgccgtcatctcgtctcttcccggtacgtggctgtccatgttcacgggcaggtacggcaatgaggttcccgcacacaaacctctaccaagcatacgctggcaagccgttgcatgagacgacgcctccgcccgccacaccaacggtcaccgccacggccacggtgaccgtgaccgtg

SEQ ID NO: 262 - DNA, 811 bp, Propionibacterium acnes
  source 1..811: mol_type = genomic DNA
attttgtccacccacccctgtcgattttgtccgccaagtattagacaaaccattagacagtgaattagaccctgggtcgcgtcagcgtgttagctcaccaacgcgcgcgcgcgcggcggccgagccgccgaagccaaagaaacccataccaccaacgcctgaaccagcagcccccgcttcagacagtcctgtgtcagcgcacgctgatgaggctgccgagttggcgtggcagttcgtggggtggtgtcctcagctggtaggggcaccgaagaaggtgcgtggccagctccgtcagctggtcgctgccgagatccgccggaatccgggctggctggatgcgccagcgttggaggttgttgcccagcgggtacgtgctgaaggtgcgctgggggtccagcactgcgagattgtgcgagccgagctgcacggggtgatcgccgaccagaaggccgcccccgcccgccccgacgccctgcacgcgcgggagcccaagtggtgggacgacgtgtactacgaaggaaacacaaccgtgtggacgtacgactctgacgaaaccagtgacgacgacgaggcgtggaaccggtcgcaggtatgtcatgttgctgagcgtgacgacatggctggcgggattgctaccaacctgctggcctcccacgctgatgatccgatggcctggctgactcgccgtcaaaccatgctgatggctcgtttcccccacgcccagaacgaggtcaccgcgatgtgccaaatcgtgcgcaccgccctggaggccgacctggccgccggaacccggtgggaggaccgatgaggg

SEQ ID NO: 263 - DNA, 3790 bp, Propionibacterium acnes
  source 1..3790: mol_type = genomic DNA
tagccgacacggcggaccgtgcccctgacagtaagcggcactactggagacatcaccatgaccgctcagatcctcgccccgtgcaaccagaaggctgccgtcatcgaaggagccctgccatgaaccaacctaccccccacaaggccgacgagtcacagacgagcaacaccacgaggaagtggcggcacaaggtgtcgttctaccaagacccggccgacaccgaccgagtccgcggagcgatcctccacaccatgacaaccgaaggcaaccggaacctgagccagttcgtcaacgatgccgtcatggccaaggtgaccgaactggaagcaaaatacaaccacggcgagccattccccgccgtgggagcccgaggactcccccagggcggcgcagccgccaacagataagagggcggggaccaccaatagcagtcgatttcggatccagatcgggtagacaggacccatgatgaatttcatatcctccctgctctcggccatcctgaccctctttgcgatggtagccgtggcgataggagtggtgaacattgtgccgggaatatgcgccatcatcggtgcacggaaatacggcgaccaggaccgtgtgcgggcaggacaacgaaagatccttcttggtgctatcgccttggtggtagcagtaggcattcacccgtgacccacggttaccggaagccccgccgcaatcgataccactgtcagtaccatcaggggcgataggggtcaagctctccttgtcacaatcccttccccggcagcccagtaaccgtcgcttacagccatacatggatatgcgcccattcgtcggcaccgacgccgtgcgggttggcgacgctgacccgtctgctcacaaacgacccttccagcccagcaccacccactacaccgacacgatccacgaagctgaaaccgaacctcccatccccgtccgaaacatcaacgaactcatcaaccccaccaaccatgcatgaacgcacgatcgcctaccggccagccttcctgcgcgacgtgaagcggctcaaaaacaagcactacaacatgaacacacactcaaatgggcggtaaggtcacgaagtcgacgtggctgcctcacggatggcttcggcgagctcttggggtcgactccacatgggccagtggccggttggcagatccatcgcggtgaagttggtcaggtgcgcgacggcgctgaacatcggattgcctgctgcggccagctcgaggacctggacgctgggaatggagcagcagatcaacgtggttagtacatcatggcgagcgctattggacagcgcgacccgtgcccgggccacttgcgcgggttcaggaaccgcccgtgcccggaaccggtcaaggtgctcgttgctgaggccctctaaactggcctgcttgccgagagtatcgaagtcaggaagtggcagctcagctgtttcctcaggtagatctggtgcgaaggcacctccatcgctcatgggaccggagtccacccagacgatccgatggaccaactctgggtgcctgtctacaactaggctcaccggcccgttcgcgccactgtgtcccaccaggaccgcatcgccgcccatctcgtccaggatggctgagatggcgtcagcttggtcgtcgagcgtgcgcgtagtgcgctgggtgtcctccggatcgaggccaggcagcgtcagccccacggctcgactgccagcagtgttcaataactcgactacctcgtcccaagcccaggctccgagccagtaaccaggaacgaggacgataggccgatgctggtcaggtcgcgatgttgaagtcatggagacatagttgcacagtgcgcggacaagggagtggcactatttctggcatgaatttagatctgggtgtccggtgaggcgatcagaacgcctccatgtactgtccgagtgtctacgatgcagcggacacagtcgagcagctggctcacaagtttccaggtgtccttctgcccctatgagggaagtcggctgctctcgcaacctttgagggctgctctggggtcggaaccagttacagatcgttcaagttccgggaactaccgccggtcacgctgattgattcccgggcgatctcgcttctgacgacagtggtcggtaaccgagaggcgtcctactctgaccccgctgctgcggtgagtaaatcacgggcgtcccggatccggccacccgtccaagtgccagccagcttgatcggctaggcatcgtcaaggagcgacgatgaggtgatgatgcgatgtgagcgcaccgcgaagtgaggtataaagaagccttcccgggcgcatgcgtcgcccaggaaggccaggttggcccctggacggctgaatggttgggcggatcaggctgtagcggagacgtgcagtacctcgtaggcgatggcgttggttgggctctggtctgcatcgtggctactgagttcgacgaggatgacggtccaggtggtgatgtcgacggcggtgacgcgggcgatggtggaatcagtggatgctgcaaggaagtcggcggttatgtcttcgatgcagtgggacggagcagtgctggtgggcaggggcacggtcttgacggtcaggcttcgggcagcagagtaatcggcggttccgttaacaagctggtggacggtccagtcctggatcgggtgccggccgaagtcgcgtacgatagccgagtaaccaagttcgccccagcagaactggcgcatcccctctatgtcgcgccagacgtagaagggcgcgtaggagttctggggtgcgcctttgaccttttcttggatgaggtaggccttgaactccagtccatggtagccgtccatgaggtgtccagtctggatgacgcagtcgcggatgatctgcatgtcatagtcggtgggcagggtgatctgatattgcatggcgtacatcagcggttctccttggtttcgtgggagtaggtcgtgggggtgacgggttcctgccaatcgatggttgacaagtcgtcggcggcttgttggtaggtaaggtggatcattggctgtttgagtgcagcgccatgccagtgtctctggccggcgtcgatccagatggattcgcccttggtcaggtgctggggtgcttgtccttcaatatggaccagggcaacgccgcccgtgacgtagaggccctgtcccttggggtgtgtgcctcagcggcaaacgtgacggcgtgggcggcacgcccggcgtcttccgtggcacgatcggccggatccatggcggcgcgcagctgctgttctgcagccaggcgtccaggtcacggcgggcagcatcgacacccagggcagcctcgacggcttcagggctacgacgctggccgggctggttgaccgcagaccactggtgccgggcgtcgtccagatcatggccggcggcgtcgatgagggcggtggtggcttcggcgcagcatcgcctgatccactccgaacgtgacaggccagctgtctcggcggcactgtcatgcgcgccaggagagatttcatgggcgctcatctgtagcctccagataggcgttgatgtagcgcagagcctgatccgtcatgtcgatggcggctgcctcggcagacgacacaacgggctgtggatgataagaccacccaacatagacggcgaacatcaatttctcgacagctttcatgaggtccccggcggcaaccgcatccgcctcatcatccgaggagaaccacttcaggtctgaacggctgtacatagcccctaggtcctgatgtgggtcgaggtccttg

SEQ ID NO: 264 - DNA, 3861 bp, Propionibacterium acnes
  source 1..3861: mol_type = genomic DNA
gctgagaaaaattttgggtccgccctgcatatcggggcctcttcataccttcaaaagtgtgaaggggaatacagactcttcgactggaattaaaatggtatatggcgtgtccgggccgcacccagctccacgatgcgccataggggagccataacttcaccaatcgtatacgatatgagtgtgggtgagcatctaccggtggccgacagtcagatacaagcatgggcggatgaagcagaagctgattatgacctcagcatgcttccgccgtctcgacgtggtcgcccaccggtggggaggggcccgggcactgtggtccctgtgcgcttcgacgcggacactctcaaggcgttgtcacaacgagcccatgacgaaggattgaccacgcgttctgacgcgatccgtgctgcggttaaccagtggctcggcctcggctcgtaaacattatcggcgcgacaaccttactgatgacgctgttggttacgccgtagagcacatcttgtactcgtgggcgctcgacgatgctgatgatcctcggtgctggatgatgattcggtgttgacccagctggcctcctcatggagctagttatcctcatctacgacgatggctatgaactcctgatccacgccatgaaagcccgccctcagtatctgagctacttcgctatctagtgttgttgggcgagttgaactcaacttttctccgacgcaagcgccaataaaaggctgatccatccgaataccaccaaacacggctgaagtgtggaacagattcagcaagacagggtgcggtgctcgggtgcgttggggagatgaggatattcaggcttctggcgggatgtggcttgatgacgtccaggatcaccggttcggttttgaaggtgccttgcattaatgtcgacagggtcgtacgactcgaggattggatcgaccagcccgttgcgtctgaagaacttcatccaccccggtggagctccggccgcgtactggtgcaacggatcattagcatgggtagcgtgagtatgccttcgatcgtggtcagtgctgtcatcatccaagattctgacgggcggcttctcactgtccgtaaacgaggcaccgaggcattcatgctgccaggcggcaagccggagcccggcgaggactcgcgtcaggcagtagtccgggaagtgcacgaagagctcggcgtcgcattgtcttccgacgacctgcgtcgggtgggagtgttcaccacgcgagcagcgaatgaggccggccatcaggtggtggcgacgattttcacccacaccccggttgcggtgagtgagccagctgctgagatcgagcagattcgttggctcgattggagtgtcgacgccctgcctgacgacctggccccgctgctggtcgaggcagtcatcccgtggctgcggcgccgtatccggtcggtcgctgtattcacgggtgcgaaggatggaaccgaccctcattatcgtgtcgaagcaaccgccttgggccggggtctcgcacacgccgggatcaccctggtttatggcggcgggaaggtcgggatgatgggtgctgttgctgatgcggccctcgctgctggcggcgctgtgatcggagtgatgccgcagcacttggtggacggggagatcgcccatcctagtctgactcacctcgaggtagtgcggactatgcatgagcgcaagcagcggatgagtgacctagctgacgcgttcgtcgcgctacccggcggcggcggaacccttgacgagctattcgaagcatggacatggcagcagctcggtgtacacagcaaacccgtggccttgtacgactcgaccttctgggcaccgctgaccgcgctactcaaccacatgaccatcgaaggcttcatccgccctgaggaccgcgcctcgctcgtgatcgccgataccatacatcagctgatggccgatcttgagggatggaccccaccaccaccgaagtggcgctcgtgacatagaacaaatgattctgactatggctcattgacatctgcgcagcggctactagctccattgacttcaaatcgggccttggccgaggctcggttcaggtggcccggaatggatccccacaaattgaatgctcatgatcgaggtgatgaacgcccactctattgtcctacgcccggttgtatccagcgagcaattgaaggtgctgcgcctgttggtcgaccaggccgagccactcatcatcgacgggcgcatcttgtacgaggcatgggacaggctgcaaacagcccgtccggcccgctagaaaaaatttttagggcccgctccgcacatcccggtctgtacccacaccttcaagggtgtgaagggaataaaaacacacctaacaacaactttgtttcatgatttggcgcgtcggaccctttctgaccgatgtcgtgcgcaacaatggacccatgagttcgcctaccaagatgcgccggaaggggacacgcggcccgaaacctcgcagcgacgaggagctaacggctgtgatgttccgcgtcccagagtcagtggccgaacgtgtcagcgatatggcttgggagctgaggctctcccgatccgatcttgtgggctggtcggccctctatgcactcaactcgatgctcagacagcgcggagaggacacgattccggttccggagtatctggacaaggccgtgctcgctgcgttgtatcccgatgggttgcccttcgacgaggacaacgaggagccgggcgagaatgccgggcaggaggagcttgcgatgactggatgagcccgaacatggttgaaggccgccccgccaggcgaccttcaatcaatggtttcggttgtcagctgcagccacccttgccaggtgctgtggttcttctccagaggaggagggaccgccatgaagaccaagaagacctagaagatccaaaagaaccggtttcggctgttgcttcggtcttcatggtagctgatagcccgcgtcgttggaagtgcgacgacgccgatcctcatcggtatcgcaccctgttccagggtcgagaatgtgaaggattaacaaccatgacaagtcatgaggcgtcctcccggagggcgtcatgaccgctttaattcaagctctgccgacagctgaactgtctgctggacctggtgctagcggtccagctagaccctctgctgagggcttcatcaagattcatcacgaccttattagtgcgggcgtgtcgggtaacgcgatggcgttgttcgtcgcgttacgtaaccagcccggctgtgatcagtggacccgtcactcgtacctgcggctagcccaatggtgcggctgggatgggctgtcggaggcggcgggctgtaagcgggtgcagcgggccgctgctgagctcgctagcggtggttggctggaatcgcgggtcggccatgatcgtcgcaccgctaagacgctggtgtggcatcggttgaccagccccgacaccgaccgctgggagcaattgccgcggattgtgtgggcgaggatctgccagatcgccggggagacgtcgggagagtgggtgaggcattggctggtgtggcggatgctggccggtcgtactggtgtggctcaggcccctatgtccatcgtggctcggttcctgggctgttcttcgcgccaggtctctcatatccgtggggctctcgttgatgccggtctgctcggctgtgacgaggtgtcgggggcggcgagccgggtgtggttcccctcgatggccgaggagtgtgcagcggatcgtgaggtggtcgatggggccgtcgtcggtgctggggtgggctctggtgaaggtgtcgaggagggcggggaacccctgtcgattttgtccacccacccctg

SEQ ID NO: 265 - DNA, 2093 bp, Propionibacterium acnes
  source 1..2093: mol_type = genomic DNA
caggtgggtttgaccgccagcgtcggattggtgctggtcgctgggctgatcaccactctcaaccgtcgttaccggacccggttcacccgccagccccgcggcaaggccatgaccctgcccagcccggacgcccaaactgccgagatagcgctgcgcagcaccagagcagccgagactctgacgatcacctgcctcgaccacgcgctccgcgcgatcggcgcatggtgccaccactgcgggcacccgctgccacccctgctggccgcccgcgtcgatgacgaccggatcgacctgctgctatcccaggcggcccccgaccatcccgaggcggtggagctggccgccgacggatcggtgtggaccctcaccgccgaccggatcgacgacctgctagcccacaccgatgacaaccaagcggctccgtggccgtctctggtcacactgggacgcgacgacgacggcgcccacatcctcatcgacttggaagccgcaggaaccttgcacctgatcgccgatgacgaccaggtcgacgcggccctcgccgcgatcgccgtggaactggccacctgtgactggtccgacgaggtcaacgtcaccctggtcggccaggtgtgcccgggcctagaagacgcactagagtctccgaccctgacccgcgccaccgacgtggacgccctcctcaccaccctggaagctcgcgccgacgaccagcgacacatcctcaccgaaggaagccccctcgccgctcaccgagccgaccccgccatctccgacgggttcgacgccgaagtgatcctcctcgacaccgaactcaccgaagaccaccgcaaccgcctcgccagcctcgtcgaggctcttccccgcgtgtcagtcgccgcggtaacaaccagccccaccagcccacacgaatggtccctcaccctgacaggtgacccactagccgccgacgtggctcccctcggctggcacatccacccccaaaccctctcccccgacctgtacaaccgcgtggttgaactactcgccaactccgccgccgcagactacgaacccgccagctggtggaaccacgacgccgacgacgagcccaccaccggccccaccaacgaggaagaatctaccccgagcaggcgagcccgcccgaatatccgcctgaccaccctgaccggcggcatcgacctatccagcgtcgacatcgacgacatcatcgacgaagccaaccaggccctcgacaacaccgacgaggccaccgaccaggttcgtgtcgacaccgaccaacccggcaccgacacccccttccccatcgacgacatcgacccgctgagctccgaccacccggtcctatccatcatcggccaccccgacatcacaggtgccactggaaccgttgggcgctccccgtggcgctgccaacagttggccctctacatcgctgagcatccgggagcatcgggggcgactatcgccgatgatttggggctatcagcgtcgacggtgcgctcgattgctacacacctgcgacactggttgggagccgacgatgccggggtggcttacatgccggcggcgacgcgcggctaccggctcgatgagcggatcgtcacagatgtggacctgatcgacgctgctgtggccggggcaggcattaacaccgctgagacggccacactggtggccattttgaagctgggccgcggacgggtcttcgctggggttcctgaatcggaacttcgccagttcagggcgtcgatgtaccacgtggaggcccgcatcgtcgatgctgccctccaagtgacagaccgggccctggaagccggggacctggggctggcccggtgggcgttgacccaagggctactggtgtctcccgatcatgaggacctggtcgccggttgtctgcgcaccgagtaccaggccggcaacatggacaaggtcgccgagctggtcgatcacctgtcggctaccgcacgccgactgggcgtcgacctcaacgaggacaccacccggatcatcgatacggtcacccacgccgacaggagagcatcatgatctcccctgcactcatctccgtcaggaaggttcctatgcaccat

SEQ ID NO: 266 - DNA, 650 bp, Propionibacterium acnes
  source 1..650: mol_type = genomic DNA
tgcgggtacacctaccagcaggcagccccggaaggcggttataaggtcaccgcaatcacgtcgtgggatgtgacctggtcggtactaggacacacgggcacagtccacatccagaaggccggtgggcagatgcttccggtcggcgagttggagtctgttgttacacggcgatgactcctgatagtccgacgctgtatgaggtgttgggggtctgccctgataccactgatgaccagatcaagacggcgtggcgtcgtgccgcgaaagtgactcaccctgatgccggtggcactagtgaggcgttcgcggccgcccggcacgcctgggaggtgttgtctgatcctgcccggcgcaccgcctacgatgccgacctggcggaggaggatgatcccgacgacgaagccgccgacgccttcgacgttgatccgttcacggcatggccctggtgcgccccgtacatcgacgccacccccaccctgcgccacacctgccccggcacgatcaaggccatcgtggtcgccatcgccgggatcatggccggaatcggctggcaggaagcgctggaggccgtggtgtcgccgccggggtttctgggggcgtgctggatagtctcagtgccggttgtcgtcgcagtgacatggctggcagcg

SEQ ID NO: 267 - DNA, 3863 bp, Propionibacterium acnes
  source 1..3863: mol_type = genomic DNA
gctgagaaaaattttgggtccgccctgcatatcggggcctcttcataccttcaaaagtgtgaaggggaatacagactcttcgactggaattaaaatggtatatggcgtgtccggtccgcacccagctccacgatgcgccataggggagccataacttcaccaatcgtatacgatatgagtgtgggtgagcatctaccggtggccgacagtcagatacaagcatgggcggatgaagcagaagctgattatgacctcagcatgcttccgccgtctcgacgtggtcgcccaccggtggggaggggcccgggcactgtggtccctgtgcgcttcgacgcggacactctcaaggcgttgtcacaacgagcccatgacgaaggattgaccacgcgttctgacgcgatccgtgctgcggttaaccagtggctcggcctcggctcgtaaacattatcggcgcgacaaccttactgatgacgctgttggttacgccgtagagcacatcttgtactcgtgggcgctcgacgatgctgatgatcctcgttgctggatgatgattcggtgttgacccagctggcctcctcatggagctagttatcctcatctacgacgatggctatgaactcctgatccacgccatgaaagcccgccctcagtatctgagctacttcgctatctagtgttgttgggcgagttgaactcaacttttctccgacgcaagcgccaataaaaggctgatccatccgaataccaccaaacacggctgaagtgtggaacagattcagcaagacagggtgcggtgctcgggtgcgttggggagatgaggatattcaggcttctggcgggatgtggcttgatgacgtccaggatcaccggttcggttttgaaggtgccttgcattaatgtcgacagggtcgtacgactcgaggattggatcgaccagcccgttgcgtctgaagaacttcatccaccccggtggagctccggccgcgtactggtgcaacggatcattagcatgggtagcgtgagtatgccttcgatcgtggtcagtgctgtcatcatccaagattctgacgggcggcttctcactgtccgtaaacgaggcaccgaggcattcatgctgccaggcggcaagccggagcccggcgaggactcgcgtcaggcagtagtccgggaagtgcacgaagagctcggcgtcgcattgtcttccgacgacctgcgtcgggtgggagtgttcaccacgcgagcagcgaatgaggccggccatcaggtggtggcgacgattttcacccacaccccggttgcggtgagtgagccagctgctgagatcgagcagattcgttggctcgattggagtgtcgacgccctgcctgacgacctggccccgctgctggtcgaggcagtcatcccgtggctgcggcgccgtatccggtcggtcgctgtattcacgggtgcgaaggatggaaccgaccctcattatcgtgtcgaagcaaccgccttgggccggggtctcgcacacgccgggatcaccctggtttatggcggcgggaaggtcgggatgatgggtgctgttgctgatgcggccctcgctgctggcggcgctgtgatcggagtgatgccgcagcacttggtggacggggagatcgcccatcctagtctgactcacctcgaggtagtgcggactatgcatgagcgcaagcagcggatgagtgacctagctgacgcgttcgtcgcgctacccggcggcggcggaacccttgacgagctattcgaagcatggacatggcagcagctcggtgtacacagcaaacccgtggccttgtacgactcgaccttctgggcaccgctgaccgcgctactcaaccacatgaccatcgaaggcttcatccgccctgaggaccgcgcctcgctcgtgatcgccgataccatacatcagctgatggccgatcttgagggatggaccccaccaccaccgaagtggcgctcgtgacatagaacaaatgattctgactatggctcattgacatctgcgcagcggctactagctccattgacttcaaatcgggccttggccgaggctcggttcaggtggcccggaatggatccccacaaattgaatgctcatgatcgaggtgatgaacgcccactctattgtcctacgcccggttgtatccagcgagcaattgaaggtgctgcgcctgttggtcgaccaggccgagccactcatcatcgacgggcgcatcttgtacgaggcatgggacaggctgcaaacagcccgtccggcccgctagaaaaaatttttagggcccgctccgcacatcccggtctgtacccacaccttcaagggtgtgaagggaataaaaacacacctaacaacaactttgtttcatgatttggcgcgtcggaccctttctgaccgatgtcgtgcgcaacaatggacccatgagttcgcctaccaagacccgccggaaggggacacgcggcccgaaacctcgcagcgacgaggagctaacggctgtgatgttccgcgtcccagagtcagtggccgaacgtgtcagcgatatggcttgggagctgaggctctcccgatccgatcttgtgggctggtcggccctctatgcactcaactcgatgctcagacagcgcggagaggacacgattccggttccggagtatctggacaaggccgtgctcgctgcgttgtatcccgatgggttgcccttcgacgaggacaacgaggagccgggcgagaatgccgggcaggaggagcttgcgatgactggatgagcccgaacatggttgaaggccgccccgccaggcgaccttcaatcaatggtttcggttgtcagctgcagccacccttgccaggtgctgtggttcttctccagaggaggagggaccgccatgaagaccaagaagacctagaagatccaaaagaaccggtttcggctgttgcttcggtcttcatggtagctgatagcccgcgtcgttggaagtgcgacgacgccgatcctcatcggtatcgcaccctgaaacagggtgttgaacatgaagggttgaccgctatgtcaagccatgagacgccctcccggagggcgtcatgaccgctttaattcaagctctgccgacagctgaactgtctgctggacctggtgctagcagtccagctagaccctctgctgagggcttcatcaagattcatcacgacctcattagtgcgggcgtgtcgggtaacgcgatggcgttgttcgtcgcgttacgtaaccagcccggctgtgatcagtggacccgtcactcgtacctgcggctagcccaatggtgcggctgggatgggctgtcggaggcggcgggctgtaagcgggtgcagcgggccgctgctgagctcgctagcggtggttggctggaatcgcgggtcggccatgatcgtcgcaccgctaagacgctggtgtggcatcggttgaccagccccgacaccgaccgctgggagcaattgccgcggattgtgtgggcgaggatctgccagatcgccggagagacgtcgggagagtgggtgaggcattggctggtgtggcggatgctggccggtcgtactggtgtggctcaggcccctacgtccatcgtggcccggttcctgggctgttcttcgcgccaggtctctcatatccgtggggctctcgttgatgccggtctgctcggctgtgacgaggtgtcgggggcggcgagccgggtgtggttcccctcgatggccgaggagtgtgcagcggatcgtgaggtggtcgatggggccgtcgtcggtgctggggtgggctctggtgaaggtgtcgaggagggcggggaacccctgtcgattttgtccacccacccctgtc

SEQ ID NO: 268 - DNA, 653 bp, Propionibacterium acnes
  source 1..653: mol_type = genomic DNA
acgtgcgggtacacctaccagcaggcagcaccagcggggggctataaggtcaccgcaatcacgtcgtgggatgtgacctggtcggtactaggacacacgggcacagtccacatccagaaggccggtgggcagatgcttccggtcggcgagttggagtctgttgttacacggcgatgactcctgatagtccgacgctgtatgaggtgttgggggtctgccctgatgccactgatgaccagatcaagacggcgtggcgtcgtgccgcgaaagtgactcaccctgatgccggtggcactagtgaggcgttcgcggccgcccggcacgcctgggaggtgttgtctgatcctgcccggcgcaccgcctacgatgccgacctggcgggggaggatgatcccgacgacgaagccgccgacgccttcgacgttgatccgttcacggcatggccctggtgcgccccgtacatcgacgccacccccaccctgcgccacacctgccccggcacgatcaaggccatcgtggtcgccatcgccgggatcatggccggaatcggctggcaggaagcgctggaggccgtggtgtcgccgccggggtttctgggggcgtgctggatagtctcagtgccggttgtcgtcgcagtgacatggctggcagcg

SEQ ID NO: 269 - DNA, 3862 bp, Propionibacterium acnes
  source 1..3862: mol_type = genomic DNA
gctgagaaaaattttgggtccgccctgcatatcggggcctcttcataccttcaaaagtgtgaagggaatacagactcttcgactggaattaaaatggtatatggcgtgtccggtccgcacccagctccacgatgcgccatagaggagccataacttcaccaatcgtatacgatatgagtgtaggtgagcatctaccggtggccgacagtcagatacaagcatgggcggatgaagcagaagctgattatgacctcagcatgcttccgccgtctcgacgtggtcgcccaccggtggggaggggcccgggcactgtggtccctgtgcgcttcgacgcggacactctcaaggcgttgtcacaacgagcccatgacgaaggattgaccacgcgttctgacgcgatccgtgctgcggttaaccagtggctcggcctcggctcgtaaacattatcggcgcgacaaccttactgatgacgctgttggttacgccgtagagcacatcttgtactcgtgggcgctcgacgatgctgatgatcctcgttgctggatgatgattcggtgttgacccagctggcctcctcatggagctagttatcctcatctacgacgatggctatgaactcctgatccacgccatgaaagcccgccctcagtatctgagctacttcgctatctagtgttgttgggcgagttgaactcaacttttctccgacgcaagcgccaataaaaggctgatccatccgaataccaccaaacacggctgaagtgtggaacagattcagcaagacagggtgcggtgctcgggtgcgttggggagatgaggatattcaggcttctggcgggatgtggcttgatgacgtccaggatcaccggttcggttttgaaggtgccttgcattaatgtcgacagggtcgtacgactcgaggattggatcgaccagcccgttgcgtctgaagaacttcatccaccccggtggagctccggccgcgtactggtgcaacggatcattagcatgggtagcgtgagtatgccttcgatcgtggtcagtgctgtcatcatccaagattctgacgggcggcttctcactgtccgtaaacgaggcaccgaggcattcatgctgccaggcggcaagccggagcccggcgaggactcgcgtcaggcagtagtccgggaagtgcacgaagagctcggcgtcgcattgtcttccgacgacctgcgtcgggtgggagtgttcaccacgcgagcagcgaatgaggccggccatcaggtggtggcgacgattttcacccacaccccggttgcggtgagtgagccagctgctgagatcgagcagattcgttggctcgattggagtgtcgacgccctgcctgacgacctggccccgctgctggtcgaggcagtcatcccgtggctgcggcgccgtatccggtcggtcgctgtattcacgggtgcgaaggatggaaccgaccctcattatcgtgtcgaagcaaccgccttgggccggggtctcgcacacgccgggatcaccctggtttatggcggcgggaaggtcgggatgatgggtgctgttgctgatgcggccctcgctgctggcggcgctgtgatcggagtgatgccgcagcacttggtggacggggagatcgcccatcctagtctgactcacctcgaggtagtgcggactatgcatgagcgcaagcagcggatgagtgacctagctgacgcgttcgtcgcgctacccggcggcggcggaacccttgacgagctattcgaagcatggacatggcagcagctcggtgtacacagcaaacccgtggccttgtacgactcgaccttctgggcaccgctgaccgcgctactcaaccacatgaccatcgaaggcttcatccgccctgaggaccgcgcctcgctcgtgaccgccgataccatacatcagctgatggccgatcttgagggatggaccccaccaccaccgaagtggcgctcgtgacatagaacaaatgattctgactatggctcattgacatctgcgcagcggctactagctccattgacttcaaatcgggccttggccgaggctcggttcaggtggcccggaatggatccccacaaattgaatgctcatgatcgaggtgatgaacgcccactctattgtcctacgcccggttgtatccagcgagcaattgaaggtgctgcgcctgttggtcgaccaggccgagccactcatcatcgacgggcgcatcttgtacgaggcatgggacaggctgcaaacagcccgtccggcccgctagaaaaaatttttagggcccgctccgcacatcccggtctgtacccacaccttcaagggtgtgaagggaataaaaacacacctaacaacaactttgtttcatgatttggcgcgtcggaccctttctgaccgatgtcgtgcgcaacaatggacccatgagttcgcctaccaagacccgccggaaggggacacgcggcccgaaacctcgcagcgacgaggagctaacggctgtgatgttccgcgtcccagagtcagtggccgaacgtgtcagcgatatggcttgggagctgaggctctcccgatccgatcttgtgggctggtcggccctctatgcactcaactcgatgctcagacagcgcggagaggacacgattccggttccggagtatctggacaaggccgtgctcgctgcgttgtatcccgatgggttgcccttcgacgaggacaacgaggagccgggcgagaatgccgggcaggaggagcttgcgatgactggatgagcccgaacatggttgaaggccgccccgccaggcgaccttcaatcaatggtttcggttgtcagctgcagccacccttgccaggtgctgtggttcttctccagaggaggagggaccgccatgaagaccaagaagacctagaagatccaaaagaaccggtttcggctgttgcttcggtcttcatggtagctgatagcccgcgtcgttggaagtgcgacgacgccgatcctcatcggtatcgcaccctgaaacagggtgttgaacatgaagggttgaccgctatgtcaagccatgagacgccctcccggagggcgtcatgacctctttaattcaagctctgccgacagctgaactgtctgctggacctggtgctagcagtccagctagaccctctgctgagggcttcatcaagattcatcacgacctcattagtgcgggcgtgtcgggtaacgcgatggcgttgttcgtcgcgttacgtaaccagcccggctgtgatcagtggacccgtcactcgtacctgcggctagcccaatggtgcggctgggatgggctgtcggaggcggcgggctgtaagcgggtgcagcgggccgctgctgagctcgctagcggtggttggctggaatcgcgggtcggccatgatcgtcgcaccgctaagacgctggtgtggcatcggttgaccagccccgacaccgaccgctgggagcaattgccgcggattgtgtgggcgaggatctgccagatcgccggggagacgtcgggagagtgggtgaggcattggctggtgtggcggatgctggccggtcgtactggtgtggctcaggcccctatgtccatcgtggctcggttcctgggctgttcttcgcgccaggtctctcatatccgtggggctctcgttgatgccggtctgctcggctgtgacgaggtgtcgggggcggcgagccgggtgtggttcccctcgatggccgaggagtgtgcagcggatcgtgaggtggttgatggggccgtcgtcgatgctggggtgggctctggtgaaggtgtcgaggagggcggggaacccctgtcgattttgtccacccacccctgtc

SEQ ID NO: 270 - DNA, 2238 bp, Propionibacterium acnes
  source 1..2238: mol_type = genomic DNA
gacgccggccaccccaactactccgacccacacggtgaccccagctccggcctctgccggccactcgaccagcgacgagcacccactccatacggataccgccgcagcggacaaggccagcaacgaggacgccctgtccccaatccaggtgggtttgaccgccagcgtcggactggtgctggtcgccggactgatcaccaccctcaaccgccgctaccggacccggttcacccgccagccccgcggcaaggccatgaccctgcccagcccggacgcccaaactgccgagatagcgctgcgcagcaccggggcgactgacactctgacgatcacctgcctcgaccaggcgctccgcgcgatcggcgcatggtgccaccactgcgggcacccgctgccacccctgctggccgcccgcgtcgatgacgaccggatcgacctgctgctatcccaggcggcccccgaccatcccgaggcggtggagctggccgccgacggatcggtgtggaccctcaccgccgaccggatcgacgacctgctagcccacaccgatgacaaccaagcggctccgtggccgtctctggtcacactgggacgcgacgacgacggcgcccacatcctcatcgacttggaagccgcaggaaccttgcacctgatcgccgatgacgaccaggtcgacgcggccctcgccgcgatcgccgtggaactggccacctgcgactggtccgacgaagtcaacgtcaccctcgtcggccaggtgtgcccgggcctagaagacgcactagagtctccgaccctgacccgcgccaccgacgtggacaccctcctcaccaccctagaagctcgcgccgacgaccagcgacacatcctcaccgaaggaaaccccctcgccgctcaccgagccgaccccgccatctccgacgggttcgacgccgaagtgatcctcctcgacaccgaactcaccgaagaccaccgcaaccgcctcgccagcctcgtcgaggctcttccccgcgtgtcagtcgccgcggtaacaaccagccccaccagcccagacgaatggtccctcaccctgacaggtgacccactagccgccgacctggctcccctcggctggcacatccacccccaaaccctctcccccgacctgtacaaccgcatggttgaactactcgccaactccgccgccgcagactacgaacccgccagctggtggaaccacgacgccgacgacgagcccaccaccgaccccaccaacgaggaagaatctaccccgagcaggcgagcccgcccgaatatccgcctgaccaccctgaccggcggcatcgacctatccagcgtcgacatcgacgacatcatcgacgaagccaaccaagccctcgacaacaccgaccagaccaccaaccaggttcgcgtcgacaccgaccaacccggcaccgacacccccttccccatcgacgacatcgacccgctgagctccgaccacccggtcctatccatcatcggccacccccacatcacaggtgccactggaaccgttgggcgctccccgtggcgctgccaacagttggccctctacatcgctgagcatccgggagcatcgggggcgactatcgccgatgatttggggctatcagcgtcgacggtgcgctcgattgctacacacctgcgacactggttgggagccgacgatgccggggtggcttacatgccggcggcgacgcgcggctaccggctcgatgagcggatcgtcacagatgtggacctgatcgacgctgctgtggccggggcaggcattaacaccgctgagacggccacactggtggccattttgaagctgggccgcggacgggtcttcgctggggttcctgactcggaacttcgccagttcagggcgtcgatgtaccacgtggaggcccgcatcgtcgatgctgccctccaagtgacagaccgggccctggaagccggagacttggggctggcccggtgggcgttgacccaagggctactggtgtctcccgatcatgaggacctggtcgccggttgtctgcgcaccgagtaccaggccggcaacatggacaaggtcgccgagctggtcgatcacctgtcggctaccgcacgccgactgggcgtcgacctcaacgaggacaccacccggatcatcgatacggtcacccacgccgacaggagagcatcatgatctcccctgcactcatctccgtcaggaaggttcctatgcaccat

SEQ ID NO: 271 - DNA, 739 bp, Propionibacterium acnes
  source 1..739: mol_type = genomic DNA
acgtgcgggtacacctaccagcaggcagcaccagcggggggctataaggtcaccgcaatcacgtcgtgggatgtgacctggtcggtactaggacacacgggcacagtccatatcgagaaggccggtgggcagatgcttccggtcggcgagttggagtctgttgttacacggcgatgactcctgatagtccgacgctgtatgaggtgttgggggtctgccctgatgccactgatgaccagatcaagacggcgtggcgtcgtgccgcgaaagtgactcaccctgatgccggtggcactagtgaggcgttcgcggccgcccggcacgcctgggaggtgttgtctgatcctgcccggcgcaccgcctacgatgccgacctggcgggggaggatgatcccgacgacgaagccgccgacgccttcgacgttgatccgttcacggcatggccctggtgcgccccgtacatcgacgccacccccaccctgcgccacacctgccccggcacgatcaaggccatcgtggtcgccatcgccgggatcatggccggaatcggctggcaggaagcgctggaggccgtggtgtcgccgccggggtttctgggggcgtgctggatagtctcagtgccggttgtcgtcgcagtgacatggctggcagcggtgacgggtctggcatttttcaccatggcggccatctggtgtggatggtcgttgataggtggtgcgttgctgtggggccagacgtc

SEQ ID NO: 272 - DNA, 3863 bp, Propionibacterium acnes
  source 1..3863: mol_type = genomic DNA
gctgagaaaaattttgggtccgccctgcatatcggggcctcttcataccttcaaaagtgtgaaggggaatacagactcttcgactggaattaaaatggtatatggcgtgtccggtccgcacccagctccacgatgcgccatagaggagccataacttcaccaatcgtatacgatatgagtgtgggtgagcatctaccggtggccgacagtcagatacaagcatgggcggatgaagcagaagctgattatgacctgagcatgcttccgccgtctcgacgtggtcgcccaccggtggggaggggcccgggcactgtggtccctgtgcgcttcgacgcggacactctcaaggcgttgtcacaacgagcccatgacgaaggattgaccacgcgttctgacgcgatccgtgctgcggttaaccagtggctcggcctcggctcgtaaacattatcggcgcgacaaccttactgatgacgctgttggttacgccgtagagcacatcttgtactcgtgggcgctcgacgatgccgatgatcctcgttgctggatgatgattcggtgttgacccagctggcctcctcatggagctagttatcctcatctacgacgatggctatgaactcctgatccacgccatgaaagcccgccctcagtatctgagctacttcgctatctagtgttgttgggcgagttgaactcaacttttctccgacgcaagcgccaataaaaggctgatccatccgaataccaccaaacacggctgaagtgtggaacagattcagcaagacagggtgcggtgctcgggtgcgttggggagatgaggatattcaggcttctggcgggatgtggcttgatgacgtccaggatcaccggttcggttttgaaggtgccttgcattaatgtcgacagggtcgtacgactcgaggactggatcgaccagcccgttgcgtctgaagaacttcatccaccccggtggagctccggccgcgtactggtgcaacggatcattagcatgggtagcgtgagtatgccttcgatcgtggtcagtgctgtcatcatccaagattctgacgggcggcttctcactgtccgtaaacgaggcaccgaggcattcatgctgccaggcggcaagccggagcccggcgaggactcgcgtcaggcagtagtccgggaagtgcacgaagagctcggcgtcgcattgtcttccgacgacctgcgtcgggtgggagtgttcaccacgcgagcagcgaatgaggccggccatcaggtggtggcgacgattttcacccacaccccggttgcggtgagtgagccagctgctgagatcgagcagattcgttggctcgattggagtgtcgacgccctgcctgacgacctggccccgctgctggtcgaggcagtcatcccgtggctgcggcgccgtatccggtcggtcgctgtattcacgggtgcgaaggatggaaccgaccctcattatcgtgtcgaagcaaccgccttgggccggggtctcgcacacgccgggatcaccctggtttatggcggcggggagggcgggatgatgggtgctgttgctgatgcggccctcgctgctggcggcgctgtgatcggagtgatgccgcagcacttggtggacggggagatcgcccatcctagtctgactcacctcgaggtagtgcggactatgcatgagcgcaagcagcggatgagtgacctagctgacgcgttcgtcgcgctacccggcggcggcggaacccttgacgagctattcgaagcatggacatggcagcagctcggtgtacacagcaaacccgtggccttgtacgactcgaccttctgggcaccgctgaccgcgctactcaaccacatgaccatcgaaggcttcatccgccctgaggaccgcgcctcgctcgtgatcgccgataccatacatcagctgatggccgatctcgagggatggaccccaccaccaccgaagtggcgctcgtgacatagaacaaatgattctgactatggctcattgacatctgcgcagcggctactagctccattgacttcaaatcgggccttggccgaggctcggttcaggtggcccggaatggatccccacaaattgaatgctcatgatcgaggtgatgaacgcccactctattgtcctacgcccggttgtatccagcgagcaattgaaggtgctgcgcctgttggtcgaccaggccgagccactcatcatcgacgggcgcatcttgtacgaggcatgggacaggctgcaaacagcccgtccggcccgctagaaaaaatttttagggcccgctccgcacatcccggtctgtacccacaccttcaagggtgtgaagggaataaaaacacacctaacaacaactttgtttcatgatttggcgcgtcggaccctttctgaccgatgtcgtgcgcaacaatggacccatgagttcgcctaccaagacccgccggaaggggacacgcggcccgaaacctcgcagcgacgaggagctaacggctgtgatgttccgcgtcccagagtcagtggccgaacgtgtcagcgatatggcttgggagctgaggctctcccgatccgatcttgtgggctggtcggccctctatgcactcaactcgatgctcagacagcgcggagaggacacgattccggttccggagtatctggacaaggccgtgctcgctgcgttgtatcccgatgggttgcccttcgacgaggacaacgaggagccgggcgagaatgccgggcaggaggagcttgcgatgactggatgagcccgaacatggttgaaggccgccccgccaggcgaccttcaatcaatggtttcggttgtcagctgcagccacccttgccaggtgctgtggttcttctccagaggaggagggaccgccatgaagaccaagaagatctagaagatccaaaagaaccggtttcggctgttgcttcggtcttcatggtagctgatagcccgcgtcgttggaagtgcgacgacgccgatcctcatcggtatcgcaccctgaaacagggtgttgaacatgaagggttgaccgctatgtcaagtcatgagacgccctcccggagggcgtcatgaccgctttaattcaagctctgccgacagctgaactgtctgctggacctggtgctagcagtccagctagaccctctgctgagggcttcatcaagattcatcacgaccttattagtgcgggcgtgtcgggtaacgcgatggcgttgttcgtcgcgttacgtaaccagcccggctgtgatcagtggacccgtcactcgtacctgcggctagcccaatggtgcggctgggatgggctgtcggaggcggcgggctgtaagcgggtgcagcgggccgctgctgagctcgctagcggtggttggctggaatcgcgggtcggccatgatcgtcgcaccgctaagacgctggtgtggcatcggttgaccagccccgacaccgaccgctgggagcaattgccgcggattgtgtgggcgaggatctgccagatcgccggggagacgtcgggagagtgggtgaggcattggctggtgtggcggatgctggccggtcgtactggtgtggctcaggcccctacgtccatcgtggctcggttcctgggctgttcttcgcgccaggtctctcatatccgtggggctctcgttgatgccggtctgctcggctgtgacgaggtctcgggggcggcgagccgggtgtggttcccctcgatggccgaggagtgtgcagcggatcgtgaggtggtcgatggggccgtcgtcggtgctggggtgggctctggtgaaggtgtcgaggagggcggggaacccctgtcgattttgtccacccacccctgtc

SEQ ID NO: 273 - DNA, 2238 bp, Propionibacterium acnes; identical to SEQ ID NO: 215
  source 1..2238: mol_type = genomic DNA

SEQ ID NO: 274 - DNA, 3865 bp, Propionibacterium acnes
  source 1..3865: mol_type = genomic DNA
gctgagaaaaattttgggtccgccctgcatatcggggcctcttcataccttcaaaagtgtgaaggggaatacagactcttcgactggaattaaaatggtatatggcgtgtccggtccgcacccagctccacgatgcgccatagaggagccataacttcaccaatcgtatacgatatgagtgtgggtgagcatctaccggtggccgacagtcagatacaagcatgggcggatgaagcagaagctgattatgacctgagcatgcttccgccgtctcgacgtggtcgcccaccggtggggaggggcccgggcactgtggtccctgtgcgcttcgacgcggacactctcaaggcgttgtcacaacgagcccatgacgaaggattgaccacgcgttctgacgcgatccgtgctgcggttaaccagtggctcggcctcggctcgtaaaaattatcggcgcgacaaccttactgatgacgctgttggttacgccgtagagcacatcttgtactcgtgggcgctcgacgatgccgatgatcctcgttgctggatgatgattcggtgttgacccagctggcctcctcatggagctagttatcctcatctacgacgatggctatgaactcctgatccacgccatgaaagcccgccctcagtatctgagctacttcgctatctagtgttgttgggcgagttgaactcaacttttctccgacgcaagcgccaataaaaggctgatccatccgaataccaccaaacacggctgaagtgtggaacagattcagcaagacagggtgcggtgctcgggtgcgttggggagatgaggatattcaggcttctggcgggatgtggcttgatgacgtccaggatcaccggttcggttttgaaggtgccttgcattaatgtcgacagggtcgtacgactcgaggactggatcgaccagcccgttgcgtctgaagaacttcatccaccccggtggagctccggccgcgtactggtgcaacggatcattagcatgggtagcgtgagtatgccttcgatcgtggtcagtgctgtcatcatccaagattctgacgggcggcttctcactgtccgtaaacgaggcaccgaggcattcatgctgccaggcggcaagccggagcccggcgaggactcgcgtcaggcagtagtccgggaagtgcacgaagagctcggcgtcgcattgtcttccgacgacctgcgtcgggtgggagtgttcaccacgcgagcagcgaatgaggccggccatcaggtggtggcgacgattttcacccacaccccggttgcggtgagtgagccagctgctgagatcgagcagattcgttggctcgattggagtgtcgacgccctgcctgacgacctggccccgctgctggtcgaggcagtcatcccgtggctgcggcgccgtatccggtcggtcgctgtattcacgggtgcgaaggatggaaccgaccctcattatcgtgtcgaagcaaccgccttgggccggggtctcgcacacgccgggatcaccctggtttatggcggcggggaggtcgggatgatgggtgctgttgctgatgcggccctcgctgctggcggcgctgtgatcggagtgatgccgcagcacttggtggacggggagatcgcccatcctagtctgactcacctcgaggtagtgcggactatgcatgagcgcaagcagcggatgagtgacctagctgacgcgttcgtcgcgctacccggcggcggcggaacccttgacgagctattcgaagcatggacatggcagcagctcggtgtacacagcaaacccgtggccttgtacgactcgaccttctgggcaccgctgaccgcgctactcaaccacatgaccatcgaaggcttcatccgccctgaggaccgcgcctcgctcgtgatcgccgataccatacatcagctgatggccgatctcgagggatggaccccaccaccaccgaagtggcgctcgtgacatagaacaaatgattctgactatggctcattgacatctgcgcagcggctactagctccattgacttcaaatcgggccttggccgaggctcggttcaggtggcccggaatggatccccacaaattgaatgctcatgatcgaggtgatgaacgcccactctattgtcctacgcccggttgtatccagcgagcaattgaaggtgctgcgcctgttggtcgaccaggccgagccactcatcatcgacgggcgcatcttgtacgaggcatgggacaggctgcaaacagcccgtccggcccgctagaaaaaatttttagggcccgctccgcacatcccggtctgtacccacaccttcaagggtgtgaagggaataaaaacacacctaacaacaactttgtttcatgatttggcgcgtcggaccctttctgaccgatgtcgtgcgcaacaatggacccatgagttcgcctaccaagacccgccggaaggggacacgcggcccgaaacctcgcagcgacgaggagctaacggctgtgatgttccgcgtcccagagtcagtggccgaacgtgtcagcgatatggctttggagctgaggctctcccgatccgatcttgtgggctggtcggccctctatgcactcaactcgatgctcagacagcgcggagaggacacgattccggttccggagtatctggacaaggccgtgctcgctgcgttgtatcccgatgggttgcccttcgacgaggacaacgaggagccgggcgagaatgccgggcaggaggagcttgcgatgactggatgagcccgaacatggttgaaggccgccccgccaggcgaccttcaatcaatggtttcggttgtcagctgcagccacccttgccaggtgctgtggttcttctccagaggaggagggaccgccatgaagaccaagaagatctagaagatccaaaagaaccggtttcggctgttgcttcggtcttcatggtagctgatagcccgcgtcgttggaagtgcgacgacgccgatcctcatcggtatcgcaccctgaaacagggtgttgaacatgaagggttgaccgctatgtcaagtcatgagacgccctcccggagggcgtcatgaccgctttaattcaagctctgccgacagctgaactgtctgctggacctggtgctagcagtccagctagaccctctgctgagggcttcatcaagattcatcacgaccttattagtgcgggcgtgtcgggtaacgcgatggcgttgttcgtcgcgttacgtaaccagcccggctgtgatcagtggacccgtcactcgtacctgcggctagcccaatggtgcggctgggatgggctgtcggaggcggcgggctgtaagcgggtgcagcgggccgctgctgagctcgctagcggtggttggctggaatcgcgggtcggccatgatcgtcgcaccgctaagacgctggtgtggcatcggttgaccagccccgacaccgaccgctgggagcaattgccgcggattgtgtgggcgaggatctgccagatcgccggggagacgtcgggagagtgggtgaggcattggctggtgtggcggatgctggccggtcgtactggtgtggctcaggcccctacgtccatcgtggctcggttcctgggctgttcttcgcgccaggtctctcatatccgtggggctctcgttgatgccggtctgctcggctgtgacgaggtctcgggggcggcgagccgggtgtggttcccctcgatggccgaggagtgtgcagcggatcgtgaggtggtcgatggggccgtcgtcggtgctggggtgggctctggtgaaggtgtcgaggagggcggggaacccctgtcgattttgtccacccacccctgtcga

SEQ ID NO: 275 - DNA, 3865 bp, Propionibacterium acnes
  source 1..3865: mol_type = genomic DNA
gctgagaaaaattttgggtccgccctgcatatcggggcctcttcataccttcaaaagtgtgaaggggaatacagactcttcgactggaattaaaatggtatatgccgtgtccggtccgcacccagctccacgatgcgccataggggagccataacttcaccaatcgtatacgatatgagtgtgggtgagcatctaccggtggccgacagtcagatacaagcatgggcggatgaagcagaagctgattatgacctcagcatgcttccgccgtctcgacgtggtcgcccaccggtggggaggggcccgggcactgtggtccctgtgcgcttcgacgcggacactctcaaggcgttgtcacaacgagcccatgacgaaggattgaccacgcgttctgacgcgatccgtgctgcggttaaccagtggctcggcctcggctcgtaaacattatcggcgcgacaaccttactgatgacgctgttggttacgccgtagagcacatcttgtactcgtgggcgctcgacgatgctgatgatcctcggtgctggatgatgattcggtgttgacccagctggcctcctcatggagctagttatcctcatctacgacgatggctatgaactcctgatccacgccatgaaagcccgccctcagtatctgagctacttcgctatctagtgttgttgggcgagttgaactcaacttttctccgacgcaagcgccaataaaaggctgatccatccgaataccaccaaacacggctgaagtgtggaacagattcagcaagacagggtgcggtgctcgggtgcgttggggagatgaggatattcaggcttctggcgggatgtggcttgatgacgtccaggatcaccggttcggttttgaaggtgccttgcattaatgtcgacagggtcgtacgactcgaggattggatcgaccagcccgttgcgtctgaagaacttcatccaccccggtggagctccggccgcgtactggtgcaacggatcattagcatgggtagcgtgagtatgccttcgatcgtggtcagtgctgtcatcatccaagattctgacgggcggcttctcactgtccgtaaacgaggcaccgaggcattcatgctgccaggcggcaagccggagcccggcgaggactcgcgtcaggcagtagtccgggaagtgcacgaagagctcggcgtcgcattgtcttccgacgacctgcgtcgggtgggagtgttcaccacgcgagcagcgaatgaggccggccatcaggtggtggcgacgattttcacccacaccccggttgcggtgagtgagccagctgctgagatcgagcagattcgttggctcgattggagtgtcgacgccctgcctgacgacctggccccgctgctggtcgaggcagtcatcccgtggctgcggcgccgtatccggtcggtcgctgtattcacgggtgcgaaggatggaaccgaccctcattatcgtgtcgaagcaaccgccttgggccggggtctcgcacacgccgggatcaccctggtttatggcggcgggaaggtcgggatgatgggtgctgttgctgatgcggccctcgctgctggcggcgctgtgatcggagtgatgccgcagcacttggtggacggggagatcgcccatcctagtctgactcacctcgaggtagtgcggactatgcatgagcgcaagcagcggatgagtgacctagctgacgcgttcgtcgcgctacccggcggcggcggaacccttgacgagctattcgaagcatggacatggcagcagctcggtgtacacagcaaacccgtggccttgtacgactcgaccttctgggcaccgctgaccgcgctactcaaccacatgaccatcgaaggcttcatccgccctgaggaccgcgcctcgctcgtgatcgccgataccatacatcagctgatggccgatcttgagggatggaccccaccaccaccgaagtggcgctcgtgacatagaacaaatgattctgactatggctcattgacatctgcgcagcggctactagctccattgacttcaaatcgggccttggccgaggctcggttcaggtggcccggaatggatccccacaaattgaatgctcatgatcgaggtgatgaacgcccactctattgtcctacgcccggttgtatccagcgagcaattgaaggtgctgcgcctgttggtcgaccaggccgagccactcatcatcgacgggcgcatcttgtacgaggcatgggacaggctgcaaacagcccgtccggcccgctagaaaaaatttttagggcccgctccgcacatcccggtctgtacccacaccttcaagggtgtgaagggaataaaaacacgcctaacaacaactttgtttcatgatttggcgcgtcggaccctttctgaccgatgtcgtgcgcaacaatggacccatgagttcgcctaccaagatgcgccggaagggaacacgcggcccgaaacctcgcagcgacgaggagctaacggctgtgatgtgccgcatcccagagtcagtggccgaacgtgtcagcgatatggcttgggagctgaggctctcccgatccgatcttgtgggctggtcggccctctatgcactcaactcgatgctcagacagcgcggagaggacacgattccggttccggagtatctggacaaggccgtgctcactgcgttgtatcccgatgggttgcccttcgacgaggacaacgaggagccgggcgagaatgccgggcaggaggagcttgcgatgactggatgagcccgaacatggttgaaggccgccccgccaggcgaccttcaatcaatggtttcggttgtcagctgcagccacccttgccaggtgctgtggttcttctccagaggaggagggaccgccatgaagaccaagaagacctagaagatccaaaagaaccggtttcagcttttgcttcggtcttcatggtagctgatagcccgcgtcgttggaagtgcgacgacgccgatcctcatcggtatcgcaccctgaaacagggtgttgaacatgaagggttgaccgctatgtcaagccatgagacgccctcccggagggcgtcatgaccgctttaattcaagctctgccgacagctgaactgtctgctggacctggtgctagcagtccagctagaccctctgctgagggcttcatcaagattcatcacgacctcattagtgcgggcgtgtcggggaacgcgatggcgttgttcgtcgcgttacgtaaccagcccggctgtgatcagtggacccgtcactcgtacctgcggctagcccaatggtgcggctgggatgggctgtcggaggcggcgggctgtaagcgggtgcagcgggccgctgctgagctcgctagcggtggttggctggaatcgcgggtcggccatgatcgtcgcaccgctaagacgctggtgtggcatcggttgaccagccccgacaccgaccgctgggagcaattgccgcggattgtgtgggcgaggatctgccagatcgccggggagacgtcgggagagtgggtgaggcattggctggtgtggcggatgctggccggtcgtactggtgtggctcaggcccctacgaccatcgtggcccggttcctgggctgttcttcgcgccaggtctcccatatccgtggggctctcgttgatgccggtctgctcggctgtgacgaggtgtcgggggcggcgagccgggtgtggttcccctcgatggccgaggagtgtgcagcggatcgtgaggtggtcgatggggccgtcgtcgatgctgaggtgggctctggtgaaggtgtcgaggagggcggggaacccctgtcgattttgtccacccacccctgtcga

SEQ ID NO: 276 - DNA, 2889 bp, Propionibacterium acnes
  source 1..2889: mol_type = genomic DNA
aggcgagcccgccctagtatccgcctgaccaccctgaccggcggcatcgacctatccagcgtcgacatcgacgacatcatcgacgaagccaaccaggccctcgacaacaccgacgaggccaccgaccaggttcgtgtcgacgccgaccaacccggcaccgacacccccttccccatcgacgacatcgacccgctgagctccgaccatccggtcctatccatcatcggccaccccgacatcacaggtgccactggaaccgttgggcgctccccgtggcgctgccaacagttggctctctacatcgctgagcatccgggagcatcgggggcgactatcgccgatgatttggggctatcagcgtcgacggtgcgctcgattgctacacacctgcgacactggttgggagccgacgatgccggggtggcttacatgccggcggcgacgcgcggctaccggctcgatgagcggatcgtcacagatgtggacttgatcgacgctgctgtggccggggcaggcattaacaccgctgagacggccacactggtggccattttgaagctgggccgcggacgggtcttcgctggggttcctgactcggaacttcgccagttcagggcgtcgatgtaccacgtggaggcccgcatcgtcgatgctgccctccaagtgacagaccgggccctggaagccggggacctggggctggcccggtgggcgttgacccaagggctactggtgtctcccgatcatgaggacctggtcgccggttgtctgcgcaccgagtaccaggccggcaacatggacaaggtatccgaactggtcgatcacctgtcggctaccgcacgacgcctgggcgtcgatttgagcgccgacaccacccggatcatcgactccgttattacccatacacgcaggagagcatcatgatctcttctgcactcagctctgtcaggaaggttcctatgcaccattatcgtcttggtatcggcactgccctcatcgcggtagcagccgtggccggctgtcgctcaacagactcgacacccacaccacctccatcccgtgtctccgccacgacatcagcgagctctaccctcagcccgaccccgtcagccggagcgatcagtgccgccgacgccgaaaacatctaccgcaccgtccaagctaacaagatcgcactgtacaaaaagggtggcctggcacccggggaacccgcacccgcgacactgtcgaactacgccaccggccaggctctcaccgactacatgacctacatgcaccaaatctcggggcagggcatcaaaatcacatcggggaactcctcggttaccgcggtgcgggagaaaaagggtgataccacctaccccgaagccgctatcgccttggaatcgtgcgaagacgacagttcgattcgtaccgtggaccgccacggaaaggctgatcatggacgcattttccatgtcgacagttggtatgcccgcgataagaagggcaccgtcaagatgatcgcattcaactcaacggaggtccccacatgcgacgtcaagtaatcaccgcggccgtactgggcctggccctggccaccacctccctgcccgccctcgcaggcggcggcgacttgaacggcagtgtggacacggatggtcctggttacgatgtgcgtactgaggtggattaccatcacaccaccggtggtgcgggtgggggtgccacgacagggggccatcatgggggcaaaacccacggtgatggtgaaggtgaggctattgatgggcgttctcgcgccgatgccgaagccgaactagacgaagccgaccgtaaccaggacttgacttgtgatgtcttgctcccaccggcgccgaataccccagccggccaggaatgggcgaaagaatgcaatcccccagcgaaaaaggggcagaaggccaccccgaagcccgatccggtgttagtgggccgtcacgcggccttgcagctcacccttcccggcgcggcccctcgtatcgatccgtcccccgaccttaaccggtggcactcggcagcagtgggccaggctttgtggttgtcggttgatgaccccaccgccactacgcagaaatcgatcacgtttatgggccaggttgtctctttgagcgccaaacgtaacggtttgtcgtttgatatgggtgatggtcatgtcgtgcactgtgatgccacgacgacatggacggagtcggtggaaccggggaccccctcacccacgtgcggttacacctaccaacaggcagccccggccgggggctataaggtcaccgcgatcacttcgtgggatgtgacctggtcggtactaggacacacgggcacagtgcatgttgagaaagccggtgggcagatgcttccggtcggcgagttggagtcagttgtcacccgccgatgaaccccgatagccccaccctctacgaggtattgggggttacccccgacgccaccgacacccagctcaagacggcatggcgcactgctgcgaaagcgacccaccccgatgccggcggcgacccccaggcgttcacggccgcccggcacgcctgggaggtgttgtctgatcctgcccggcgcaccgcctacgatgccgacctggcgggggaggatgatcccgacgacgaagccgccgacgccttcgacgttgatccgttcacggcatggccctggtgcgccccgtacatcgacgccacccccaccctgcgccacacctgccccggcacgatcaaggccatcgtggtcgccatcgccgggatcatggccggaatcggctggcaggaagcgctggaggccgtggtgtcgccgccggggtttctgggggcgtgctggatagtctcagtgccggttgtcgtcgcagtgacatggctggcagcg

SEQ ID NO: 277 - DNA, 1224 bp, Propionibacterium acnes
  source 1..1224: mol_type = genomic DNA
gacgccggccaccccaactactccgacccacacggtgaccccagctccggcctctgccggccactcgaccagcgacgagcacccaatccatacggataccgccacagcggacaaggccagcgacgaggacgccctgtccccaatccaggtgggtttgaccgccagcgtcggactggtgctggtcgccggactgatcaccaccctcaaccgccgctaccggacccggttcacccgccagccccgcggcaaggccatgaccctgcccagcccggacgcccaaactgccgagatagcgctgcgcagcaccggggcgactgacactctgacgatcacctgcctcgaccaggcgctccgcgcgatcggcgcatggtgccaccactgcgggcacccgctgccacccctgctggccgcccgcgtcgatgacgaccggatcgacctgctgctatcccaggcggcccccgaccatcccgaggcggtggagctggccgccgacggatcggtgtggaccctcaccgctgaccggatcgacgacctgctagcccacaccgatgacaaccaagcggctccgtggccgtctctggtcacactgggacgcgacgacgacggcgcccacatcctcatcgacttggaagccgcaggaaccttgcacctgatcgccgatgacgaccaggtcgacgcggccctcgccgcgatcgccgtggaactggccacctgtgactggtccgacgaagtcaacgtcaccctcgtcggccaggtgtgcccgggcctagaagacgcactagagtctccgaccctgacccgcgccaccgacgtcgacgccctcctcaccaccctagaagctcgcgccgacgaccagcgacacatcctcaccgaaggaaaccccctcgccgctcaccgagccgaccccgccatctccgacgggttcgacgccgaagtgatcctcctcgacaccgaactcaccgaagaccaccgcaaccgcctcgccagcctcgtcgaggctcttccccgggtgtcggtggccgcggtaacaaccagccccaccagcccagacgaatggtccctcaccctgacaggtgacccactagccgccgacgtggctcccctcggctggcacatccacccccaaaccctctcccccgacctgtacaaccgcgtggttgaactactcgccaactccgcagccgcagactacgaacccgccgactggtgggaccatgacgccga

SEQ ID NO: 278 - DNA, 3861 bp, Propionibacterium acnes
  source 1..3861: mol_type = genomic DNA
gctgagaaaaattttgggtccgccctgcatatcggggcctcttcataccttcaaaagtgtgaagggaatacagactcttcgactggaattaaaatggtatatggcgtgtccggtccgcacccagctccacgatgcgccatagaggagccataacttcaccaatcgtatacgatatgagtgtaggtgagcatctaccggtggccgacagtcagatacaagcatgggcggatgaagcagaagctgattatgacctcagcatgcttccgccgtctcgacgtggtcgcccaccggtggggaggggcccgggcactgtggtccctgtgcgcttcgacgcggacactctcaaggcgttgtcacaacgagcccatgacgaaggattgaccacgcgttctgacgcgatccgtgctgcggttaaccagtggctcggcctcggctcgtaaacattatcggcgcgacaaccttactgatgacgctgttggttacgccgtagagcacatcttgtactcgtgggcgctcgacgatgccgatgatcctcgttgctggatgatgattcggtgttgacccagctggcctcctcatggagctagttatcctcatctacgacgatggctatgaactcctgatccacgccatgaaagcccgccctcagtatctgagctacttcgctatctagtgttgttgggcgagttgaactcaacttttctccgacgcaagcgccaataaaaggctgatccatccgaataccaccaaacacggctgaagtgtggaacagattcagcaagacagggtgcggtgctcgggtgcgttggggagatgaggatattcaggcttctggcgggatgtggcttgatgacgtccaggatcaccggttcggttttgaaggtgccttgcattaatgtcgacagggtcgtacgactcgaggattggatcgaccagcccgttgcgtctgaagaacttcatccaccccggtggagctccggccgcgtactggtgcaacggatcattagcatgggtagcgtgagtatgccttcgatcgtggtcagtgctgtcatcatccaagattctgacgggcggcttctcactatccgtaaacgaggcaccgaggcattcatgctgccaggcggcaagccggagcccggcgaggactcgcgtcaggcagtagtccgggaagtgcacgaagagctcggcgtcgcattgtcttccgacgacctgcgtcgggtgggagtgttcaccacgcgagcagcgaatgaggccggccatcaggtggtggcgacgattttcacccacaccccggttgcggtgagtgagccagctgctgagatcgagcagattcgttggctcgattggagtgtcgacgccctgcctgacgacctggccccgctgctggtcgaggcagtcatcccgtggctgcggcgccgtatccggtcggtcgctgtattcacgggtgcgaaggatggaaccgaccctcattatcgtgtcgaagcaaccgccttgggccggggtctcgcacacgccgggatcaccctggtttatggcggcgggaagggcggggtgatgggtgctgttgctgatgcggccctcgctgctggcggcgctgtgatcggagtgatgccgcagcacttggtggacggggagatcgcccatcctagtctgactcacctcgaggtagtgcggactatgcatgagcgcaagcagcggatgagtgacctagctgacgcgttcgtcgcgctacccggcggcggcggaacccttgacgagctattcgaagcatggacatggcagcagctcggtgtacacagcaaacccgtggccttgtacgactcgaccttctgggcaccgctgaccgcgctactcaaccacatgaccatcgaaggcttcatccgccctgaggaccgcgcctcgctcgtgatcgccgataccatacatcagctgatggccgatcttgagggatggaccccaccaccaccgaagtggcgctcgtgacatagaacaaatgattctgactatggctcattgacatctgcgcagcggctactagctccattgacttcaaatcgggccttggccgaggctcggttcaggtggcccggaatggatccccacaaattgaatgctcatgatcgaggtgatgaacgcccactctattgtcctacgcccggttgtatccagcgagcaattgaaggtgctgcgcctgttggtcgaccaggccgagccactcactattgacgggaaagtcctgttcgagacctgggacgggctgcaggcagcccgtcctcacagctgagaaaaaattttggggccgttccgcacatcccggtctgtacccacaccttcaagggtgtgaagggaataaaaacacacctaacaacaactttgtttcatgatttggcgcgtcggaccctttctgaccgatgtcgtgcgcaacaatggacccatgagttcgcctaccaagatgcgccggaagggaacacgcggcccgaaacctcgcagcgacgaggagctaacggctgtgatgtgccgcatcccagagtcagtggccgaacgtgtcagcgatatggcttgggagctgaggctctcccgatccgatcttgtgggctggtcggccctctatgcactcaactcgatgctcagacagcgcggagaggacacgattccggttccggagtatctggacaaggccgtgctcactgcgttgtatcccgatgggttgcccttcgacgaggacaacgaggagccgggcgagaatgccgggcaggaggagcttgcgatgactggatgagcccgaacatggttgaaggccgccccgccaggcgaccttcaatcaatggtttcggttgtcagctgcagccacccttgccaggtgctgtggttcttctccagaggaggagggaccgccatgaagaccaagaagacctagaagatccaaaagaaccggtttcagcttttgcttcggtcttcatggtagctgatagcccgcgtcattggaagtgcgacgacgccgatcctcatcggtatcgcaccctgaaacagggtgttgaacatgaagggttgaccgctatgtcaagccatgagacgccctcccggagggcgtcatgaccgctttaattcaagctctgccgacagctgaactgtctgctggacctggtgctagcagtccagctagaccctctgctgagggcttcatcaagattcatcacgacctcattagtgcgggcgtgtcgggtaacgcgatggcgttgttcgtcgcgttacgtaaccagcccggctgtgatcagtggacccgtcactcgtacctgcggctagcccaatggtgcggctgggatgggctgtcggaggcggcgggctgtaagcgggtgcagcgggccgctgctgagctcgctagcggtggttggctggaatcgcgggtcggccatgatcgtcgcaccgctaagacgctggtgtggcatcggttgaccagccccgacaccgaccgctgggagcaattgccgcggattgtgtgggcgaggatctgccagatcgccggggagacgtcgggagagtgggtgaggcattggctggtgtggcggatgctggccggtcgtactggtgtggctcaggcccctacgtccatcgtggcccggttcctgggctgttcttcgcgccaggtctctcatatccgtggggctctcgttgatgccggtctgctcggctgtgacgaggtgtcgggggcggcgagccgggtgtggttcccctcgatggccgaggagtgtgcagcggatcgtgaggtggtcgatggggccgtcgtcggtgctgaggtgggctctggtgaaggtgtcgaggagggcggggaacccctgtcgattttgtccacccacccctgtc

SEQ ID NO: 279 - DNA, 3714 bp, Propionibacterium acnes
  source 1..3714: mol_type = genomic DNA
cgattttgtccacccacccctgtcgattttgtccgccaagtattagacaaaccattagacagtgaattagaccctgggtcgcgtcagcgtgttagctcaccaacgcgcgcgcgcgcggcggccgagccgccgaagccaaagaaacccataccaccaacgcctgaaccagcagcccccgcttcagacagtcctgtgtcagcgcacgctgatgaggctgccgagttggcgtggcggttcgtggggtggtgtcctcagctggtaggggcaccgaagaaggtgcgtggccagctccgtcagctggtcgctgccgagatccgccggaatccgggctggctggatgcgccagcgttggaggttgttgcccagcgggtacgtgctgaaggtgcgctgggggtccagcactgcgagattgtgcgagccgagctgcacggggtgatcgccgaccagaaggccgcccccgcccgccccgacgccctgcacgcgcgggagcccaagtggtgggacgacgtgtactacgaaggaaacacaaccgtgtggtacgactctgacgaaaccagtgacgacgacgaggcgtggaaccggtcgcaggtatgtcatgttgctgagcgtgacgacatggctggcgggattgctaccaacctgctggcctcccacgctgatgatccgatggcctggctgactcgccgtcaaaccatgctgatggctcgtttcccccacgcccagaacgaggtcatcgcgatgtgccacatcgtgcgcaccgccctggaggccgacatggccgccggaacccggtgggaggactgatgagggtctcccggcgcgccctcatggccgtggcccgtgccgacgctgccgcagcagaccatgccaccggccgatgggtggccacagccaacgccaccgtcgcccggctgaccggactgtgcgaacgcaccgtccaatacgcccgcgccaccctggtccacctgggcctgtgccgcgtcgtggccaccggccgctacctcaccgccgacgagcggcgcacggctgctcgcacccatggcggccgccagatgcgcgccgcctccacccgcgtcctcaccatgtcctgcgcaatcgtttgcgccctaccccgaaggggtcaccactacaggaaagttaagttcctagatggtcaccaacgcacgcgcaggcgcgtgcgaaggccagcaacaccagagaagaaacccctgtggctgcaaaaactcgcagccctcctcgaccagcacctgccctggctggtgagaaaccatcacatcggccgactgtgccacgccctcaccgccctgggcatcgacgaacactggcaacccgcagacctcgacgccctcctcgacgccatgaaccgcaggaaccgtcgcctcggcctcgacgtgccatgcgccgacgaccagcacaaccccttgggactgttcatccaccaggcccgagacaccctcacccacgacaacccccatgaacgccgcctggcccgcgaacaccaccgcgcccaactcatcgacgaccaactccgccgccgcgcagaaaccgccacctgcgcagcccgcctcgcagccgagcacgccgaccccgactaccagacccgccgtcgtgaacgcagggaaaccctgcgagccacactcagggccgcccagcagcatgtcaggacacactgatacccgctcatacacacaccatgaaacacgacaagccacctgacagtatcagctgcaagacgcatgacaacatagaaggacatgatgaaatacacatagacacaaccccgcacagcagtttcgcaacaaatcatgatagtctcatggcagtatcgcttgatacacacatagcatcactcccacataggcagttatgctgatatactcctactaggttatccgtccaacatgctgagtgggttcctgtacagcatgaaaggagcatggcatgatatgggccgttctcaactgcaagggtggtgtcggcaagacgaccagtgccctcctgctggcggcagccgccgccaagcagggccacaccaccctggtggccgacgctgacccccagggcaccgcatcccagtggtcagccctggcaaccaaaaacgacgaacccctgcccttcccggtgcaagcggtcaacatcgccaccatggaggcactgcccaccaccgacgcccatgatctcatcctcgttgacacacccccctcggcaggcgatctgatgttccaggcatgccgcatcgccgacctcatcatcatccccaccgccacctccggacccgacatctcccgaacatgggtcaccatggacgccacacaaggcacaccacgcgcgatcctcctcacccaaaccgaacacaaccgtgtcgtctaccgccaagctcgcactgccctcgccgccgacgacaccgtcgttctcctggaccacgacatcccccgccgtgaatccatccgcacagcatggggcaccaaccccccagacgacgtcatcacctactacctgcccgtcctcaacgaactcatggaggccctgtcatgaccaccaagaaaaccgacccattcgcccgccagaaagcagcagaagaccgcgcccaccaactccaagacgaagcccaacgccacgcccaccccaaacgcgtcatcggccccaccgcacgattccagttcgtcctgccagccgacgtgctcaccggcctcaaacacctcgccctcacccgcggcaccaccgcccgccaactcaccctcgacgccctcgacaccgcctacggcctcgacaccctcgccaacagcgggaagaaaacccacccatgacccgtgggtccccctgccaccaccccctcgacggcaactgtgtgcgagccacaggcccgcacacaggcggcagcccagtgccgtccccgccaggaaaggaactgaacttttctggagtgctggctccctatcaccccttatggtgctatcagatccagtagcgccagcccgagaggaaacccatgagctacatcgtccgcaccggaaatctagccggcacccccgagctgcgcgaggggtagccgacacggcggaccgtgcccctgacagtaagcggcactactggagacatcaccatgaccgctcagatcctcgccccgtgcaaccagaaggctgccgtcatcgaaggagccctgccatgaaccaacctaccccccacaaggccgacgagtcacagacgagcaacaccacgaggaagtggcggcacaaggtgtcgttctaccaagacccggccgacaccgaccgagtccgcggagcgatcctccacaccatgacaaccgaaggcaaccggaacctgagccagttcgtcaacgatgccgtcatggccaaggtgaccgaactggaagcaaaatacaaccacggcgagccattccccgccgtgggagcccgaggactccccccagggcggcgcagtcgccaacagataagagggcggggaccaccaatagcagtcgatttcggatctagatcgggtagacaggacccatgatgaatttcatatcctccctgctctcggccatcctgaccctctttgcgatggtagccgtggcgataggagtggtgaacattgtgccgggaatatgcgccatcatcggtgcacggaaatacggcgaccaggaccgtgtgcgggcaggacaacgaaagatccttcttggtgctatcgccttggtggtagcagtaggcattc

SEQ ID NO: 280 - DNA, 3907 bp, Propionibacterium acnes
  source 1..3907: mol_type = genomic DNA
ttggtattggtaggcgatggtgtcaccggttttgttgcggatgacgtcgaagccttcgatgtcggaggggatgtcgtcggcgtcgtagacgacggtggtggtgacggggttggaggccgacatttggccgatggtcacgcgcagcatgtttttcaacgcggaggtgaggattgtcgtggcggtggggttcttgtctgcccagcgtttctcggcgatgtcgatcatgtcttggatggttttgacccatcctcggatgggatcgactttggtcagtttgatccctccaaggaactcgatgggcttagtaacgggcccgtcaggaccgaattcggtgtcccagccttcgtcgatggctagtttcagttcggcggcgtcaacccatgtttcgtgggtggtgccgggcacgttgggccaaaaccatcctgctcgtcctttggtgcgtttgaccggtagtaggccgatgtcgtcccaccaggatggcacggtgaagcggatgtggtagcgggccgggtgccaggggttgttggtgaacaggtcgtgagcttcggtggcgctgagcagagtggcgggtgcggcaccgatctctccggtcactgatccggcatacatgaatcggccgtcgatgtacacgaagttagggatagggccggcaggcacggtggggcgccaaccttgttcgcggtcctcggggttgccgtcgtcgacgcatagttcgtagcggtgctgaggggaggtgtgttggatgagtgcgcccagttcggggtccatcggctccatgcgataggactcgggggtccgtagcttccagaggttgattccttctgctccggggcggtccatgagggcccagtcgcggtcgattctggtggcgatgatgtgggttaattcgcgccatgcccagcgggcctggattggggtgagggtctggccagggaaccattcatcagcgaccagaatgtcgaggttgcggtcggtttctttgtgggtgaaccggcctcgggcgggccgcccggacagcatgaacaggccccgcacgtgccagtcctggttgaactcgcgggtgtgagcgggggtgtcaggcagcagccaggattgaggctggtcggggatgttaccgcagacgatcaggcgtcgggcgttgtggtgtagcgcggttgttagcaggtctgacagggtcgcgtgcttggtgcgccgcccccctagcactggcaggatctcgtttccggccgcgtcgactccccgggcggtgtcgatgtctagccacactgtttcggggtcggggggccgatgtggggcgggacggcgctgctcctggtcgtctctcatggtttcctcctttgggccagggagcggccggcgtcgagggcgttcatgcgctcgcgttgttcttcgcgtagttggtagacccggcctcgtgacactcctgctgcctcggcgatggtggtggccggcaggtggccgatggcggcagcgtcggcaaggacgtcacgccaggccaggtcaatggttcccagctgggctagagcttcgtcgcggcggcgggtggcatcagccactacggaggcccaccctgtggggtggatggtcttgacgacgattcggttgtggcggatggggccccatgcatcagcggggacttgccagccgtgattggcggcggactcggtgatcttgaggcgtcgctcaggtgcgcgggtgcgggcagtgacgtcggtgttccaggtctggactggtacccacgtcccctctcggatgcgttcgatgacgcacgtggtgacctcgtcggtgactgtgatgaccagacgataatctttcccgtctggggtggttcggtagctgggcatgtcaccctcccctatctgtcaaatgagctagacacagtgtctatttaatttgacgcaaagtcaagtgcattagacgcctttgtgtggatccgccccaccagacaaacactcgcgcctcatgacccgccgcgaagccttaacgaaaccaaaccgcttatagaaccgctccgcagcgctccccgagggctttagctccaaggtaagaccttgctcgtcggcccattggcagacttgtgtgaggatctgtgagccgtagccctgatttcggggggcggcatgcacgcacatcagcatgtgaccatgacggcgggtcggcgggctgacataagccccaccacgccagtccggtgtgatctgccaacttcgccatgccgcagcgcgccagcggcgggcctcggtagccaccatgatcaccatgatgatggacagggttacgacgccgactatggtcagctcactccagccaggccagttcccggagatgatccagcctcccagcgcccagatgatcatggcttccacgcccgccgcaatcgggacgagtggggcagtacggatgcggcctgccatgatctcggtgatctcgctgcgatgccatgacaaggagaattcccacgactcttgaatcatgctgatgtgtgaacggcttcctcggcttcgccctgccatagcttctctagacggcgctcggctagctcgtcggggcacggcgacagcctgccgcactcggagcagaccccgaagtggcgcgagagagtgatgaccggctcatcgggagcatgaaccgattcaacgaccgggtgctgctcatcggtgagtcctgaggcgtgaccaatctcggctagacggaggtgaaccataccgtcgtagtagtcgaggccttcaacgtggaacgggtaggagccgtccgcggtgtggcctgcaaccaggtccccgacttccagctgactggcggtcatggttcgcaccggcggcagcggggtccgggtcgcgttgatcctcatggtctctccttgcttctgcgccttcatagatgaaggtgccacagccggggttgatgtgcggaaccacagccactttttcaataaatccatcaccacggtctcaccccttcccaaatgtgtaaaccgtggtttacgctttaaggcatgatcgaacacacaccgacacccgccgcgcctcgcgtggccatcatttcccctagcgggccaccacggttcttggccgagcctcccagcgccgcgctgcgacgccatggtcggacccgcatgaggtcccttcccctatcccctcacattcgcgcctgggtctccaccagcggccgcaaacccaatcccgtgactactgctttgatctggatgcacaccggggccctgcttttggtgtgggacatcgccgttttgaccggccccgccctcggccactgcgtatgccctctcagtaatagcgccgagctgactgcccggcgctggctcgaccaggtcgccgacaatcccggcttcctcaacacccttaccgaggctgcccgcatcaccgatgaatggcgtcacgcaacgcctccgcacattcaagccccttaccggacccttcatcagtgaacggaggtcatgcatgactagcaatattgaatggggccacaatcccgacggccgcgccgaggctcctctttaccgagcctgggccaagatgctcgtgcgcgcctccgggctaccctggcgtatcgtcgccgccctagccgggatctcccctacttccatgcaccaacttctgttcggccgcaacggtcgacccgtggaatggatcggctccgatgatgctcgcgccctgatggatatcggcatcgatgatctcgcctcagcgtccaccgaccgtatcccggcccgcgaatcccgcgagctgttggtagccctgcacaccctcggctggaccgatgagcatctaagccgctggctgaccagttccgacctcgacctgaccaccgcccccaaagccctctacgtcactcgactatccgccgcccgcatccaggccacttacgacctgctcgtcagccaacccgtccg

SEQ ID NO: 281 - DNA, 2174 bp, Propionibacterium acnes
  source 1..2174: mol_type = genomic DNA
ccccaatgcccccacaacgatcagcacaccaacagcgatcatcaggtgggcagcactaactgatcccaacgaaccaagatcaaacaagccctgcccgggagcgccgagcagtccgtgggcgcgaagccatgctccgagattgccaataatcttggggaccatcttgttcagtagggctatccctccgatgccgacaacgaggaagacgaggatttcttcgcctgcgttgtttcttcctgtgtttgcggtcatgctgccttctcggggtggatggccagccagctgatgaggttgtcggtgatctgccctgagatttggatcagttcgtcttgcccggcctgccatgcccgcgatgtgccggccagcaatgatgctgggacccctactgcgcggccacgggatgcaacctcagccaaggcggcgcgtaactcctcgacggtgctttcgatgtaccaactgccgtcagtactagtctcagcggcatcggtggtagcgataagagcatcggtgaggtcgtcgacggcgcggtccagatcagcgatgtccggtagggctacaggagtcatggtgtgtcttccttctagggtgccttcactggtgaagggtccctagccccggccgatgtgcggtgctgtgggaaaaatgcttcccattggtccgtcttagttaggaaacttggcctaagtgctgtcgagggtcgcgtgttcgtgaccggttcgaagacactgccgccttgccttcttgcccgtggcgcttccgagatggggtcagtgggcgatggctaggccgacgagggcgccgctgcacaggctgggtgcccaggggaggaatcgggtggtgtggtgtcggaaccggtcgattagggcatatagggcgatcagggtgaggccggctatgacagtgacctggatcgtgtcgatgccggttgctgcggccggggctgcccacagtggtgtgatgcgcacgtcggagaagccgaagccgcctcgggagatgagccaggcgatcatccacgccgcggagatgacgacagtagcgatagcagcacgtatcgccgcagtatggtccgagagggcggtaacgactacagccccgatccatccggcccatccggtccacgctaggactgccggtatccatgtggtgatggcgtcaatgacggcaacccatgccccgatggtggctagcagggcccacgtcggccacgtgggtgctggggcccatgctgtggcggtgatcatggtgagtgctgctgcgctacagaccgcgatcaagcttcggaggctgtaggtgtcgcggtaggcgatcttgtcgggattggcggtgggtggttcgggcaggatgtgggtgagggcaggccatcctgcgaccgcaatagccgcgacggcgaccacccacacgatctgttgcatgggtctcatcatggcccatcatcgatgagtatgggtggccgacatggggtcactcgtagaggggatcgaggggtgtgcgggcgagcatggcttcctgtgtgccgagcatgagggtgccagagtcgtcgccggccgattcccagtcgacgatgatctgcccgctgtcgaagctggattcggtgatggtcacccattctccgtcgatattgatgagcaccccagcggccagctctgtggcagcaaccgggtgaggtgggttgtagaagcggtcgatgtcgcgggcagggtcgtcgggttcttcggttacctcgggtggggtcgatctggctgtctcggtgtcgtcggccaggtcggctcccaggatgcgttcccattcggggctggttttcttgcccgctgaggccatcgtctcgtcgatctgttcgtcagtgggccacacaaatttctttttggtccaggtcgtggtgtcgggtcgcagctgatccagcagttccaggtcttgcggggagtgggccttgcgggggtcgggggtgtagaagaattggacttccttaggggctgattcgccggataggtaggtgccgcggccgcgtttgccgaacgggattcccacgccgacgtgttcggagccgaacatcatgcgggctccgtcagcagacaggggtccggtggcggcacgcccggagaagttgtctcggatttcgccgcccaggaactcggcgtcggggcgttgggtccccagatcgacgtggatacggcagg

SEQ ID NO: 282 - DNA, 1677 bp, Propionibacterium acnes
  source 1..1677: mol_type = genomic DNA
ccccctcttctgggtggtggtccggggcgtcaccgccccggaccagttgggtagtcatctcagttgaaataagcgattagtgatacgcccctcatgctttccggtgctgtcatgagcgtctgacaacagcgacacctcggggcagccgacggacagtcctctggctgccgctctgatcccatgcccacggcacgaaggtgtcggacagctcggtctcgtcatgtgcccaaatagcgtcgtgggcctgtcgccaagcttctcgggagccccacacgggcacgaccgggccacaccggtgtcctggtctccagtgtcgcgacactgtcgatttcggtacgtgcaatgcggcggcggtttgacggatcgacatcccagactcccgcgcgtcccagatcgccatgtggagagtatttgcctccagtgcggccgccacacttgcacgctctcgcgcacgctcgaatgcccgcctagtgctctcaaatgtcgtcacgacgcctccccctgaaaatactcagggtgtcccacggtgggacaccctgagtatttcataccccaactcgcctcaccacacgtcgacctcgacaccgatcaagcgacccgtatcagcgacattgccgtaccgctgccccgcctggtcctccagccacgacaacgcatcccgaaacagcccgacgtcttccaaagctaaaccacagtcgtagccgcccttgtcccccaaccgcacaatctggcgctcccggtggcctccctcgtcgacctcgatccacagtttcgcgtgcatccgctggcctcggccctctgacaggatctcggtgagcaggtcggacgcctgccctcgcgcatcctcgttactgcgggggaattggagtatgtgggaggaacggtggtggggcaggtttgtgacctcgtgacgcagcaggttgcgcttgtgcatctgccgttcgagacgctcgggctgacctgttgacggggttgagccgtggcgccgcttcctcggcggggtctcgatccgttgctcttccggcggttcggcgtcaggttgtggtgcgcgatctcccctaggacgggggggctcgccacctatatccgagggacgatgagacggccttccacgcttgctgcgcactttcgcagcccgccccttgcggtcacatcgacgcggcggcggagtgacgtcctcaccgcgcgctaactgcgtcaacgccgccaccaggttggtgcccggtttcagccctttcagcacgaaccgcaccaggcgggggtctcggccgattcgtcgggcaatctcggcttggctccacccttcggctaacagggtgcgcaacaagtcttgggcccggttatcacgctcagtcactggtcgcctcctcggggagtcctgcctgctcggcctgctctgatagagcagcccgttccgatccggtctggggcgctttcaggggaccgggtaggacacctttgacacgcagtcgcccgtccttgccgtcgtcgccgcccccctgggccacagggagcgcccgggggggcacgttgctggtgtagatggcgtcgccgtggatagccagcagggtgcgggagttcatgcgtagtgctcctcccttggttgtggcgttttttccggtggtggggtcggcgatgggtgtgttgagggtgcgtacgcgggacagggcccagata

SEQ ID NO: 283 - DNA, 3558 bp, Propionibacterium acnes
  source 1..3558: mol_type = genomic DNA
aaccgtcatctggcgtggagtagcgagctgatgcaggaaggcaatttgtacggccttcccgaggaagacccgttgtggggcgaggccgtggagctggtagcgggacttatcccctctgtgcgggcgatgtggtcgcacgatgggcagaccgtgactgtgtcggctggccggcgggtggcgacactggggatgccgatgcggggatggcgtggtatcgagatgcgcggctggaatccagtgggcgccgatacgtggtggatcgttgaccaggtgggtagttggctggtcgatcaggatgagccgatggtcgttgacgggagggtgctccatgaggcgtgggaacggtcgcagatggtccgttcaggccgctgagaaaaaatttaggtccgccctgcatatcggggcctcttcataccttcaaaagtgtgaagggaatacagactcttcgactggaattaaaatggtatatggcgtgtccggtccgcacccagctccacgatgcgccataggggagccataacttcaccaatcgtatacgatatgagtgtaggtgagcatctaccggtggccgacagtcagatacaagcatgggcggatgaagcagaagctgattatgacctcagcatgcttccgccgtctcgacgtggtcgcccaccggtggggaggggcccgggcactgtggtccctgtgcgcttcgacgcggacactctcaaggcgttgtcacaacgagcccctgacgaaggattgaccacgcgttctgacgcgatccgtgctgcggttaaccagtggctcggcctcggctcgtaaacattatcggcgcgacaaccttactgatgacgctgttggttacgccgtagagcacatcttgtactcgtgggcgctcgacgatgctgatgatcctcgttgctggatgatgattcggtgttgacccagctggcctcctcatggagctagttatcctcatctacgacgatggctatgaactcctgatccacgccatgaaagcccgccctcagtatctgagctacttcgctatctagtgttgttgggcgagttgaactcaacttttctccgacgcaagcgccaataaaaggctgatccatccgaataccaccaaacacggctgacgtgtggaacagattcagcaagacagggtgcggtgctcgggtgcgttggggagatgaggatattcaggcttctggcgggatgtggcttgatgacgtccaggatcaccggttcggttttgaaggtgccttgcattaatgtcgacagggtcgtacgactcgaggactggatcgaccagcccgttgcgtctgaagaacttcatccaccccggtggagctccggccgcgtactggtgcaacggatcattagcatgggtagcgtgagtatgccttcgatcgtggtcagtgctgtcatcatccaaggttctgacgggcggcttctcactgtccgtaaacgaggcaccgaggcattcatgctgccaggcggcaagccggagcccggcgaggactcgcgtcaggcagtagtccgggaagtgcacgaagagctcggcgtcgcattgtcttccgacgacctgcgtcgggtgggagtgttcaccacgcgagcagcgaatgaggccggccatcaggtggtggcgacgattttcacccacaccccggttgcggtgagtgagccagctgctgagatcgagcagattcgttggctcgattggagtgtcgacgccctgcctgatgacctggccccgctgctggtcgaggcagtcatcccgtggctgcggcgccgtatccggtcggtcgctgtattcacgggtgcgaaggatggaaccgaccctcattatcgtgtcgaagcaaccgccttgggccggggtctcgcacacgccgggatcaccctggtttatggcggcgggaaggtcgggatgatgggtgctgttgctgatgcggccctcgctgctggcggcgctgtgatcggagtgatgccgcagcacttggtggacggggagatcgcccatcctagtctgactcacctcgaggtagtgcggactatgcatgagcgcaagcagcggatgagtgacctagctgacgcgttcgtcgcgctacccggcggcggcggaacccttgacgagctattcgaagcatggacatggcagcagctcggtgtacacagcaaacccgtggccttgtacgactcgaccttctgggcaccgctgaccgcgctactcaaccacatgaccatcgaaggcttcatccgccctgaggaccgcgcctcgctcgtgatcgccgataccatacatcagctgatggccgatcttgagggatggaccccaccaccaccgaagtggcgctcgtgacatagaacaaatgattctgactatggctcattgacatctgcgcagcggctactagctccattgacttcaaatcgggccttggccgaggctcggttcaggtggcccggaatggatccccacaaattgaatgctcatgatcgaggtgatgaacgcccactctattgtcctacgcccggttgtatccagcgagcaattgaaggtgctgcgcctgttggtcgaccaggccgagccactcatcatcgacgggcgcatcttgtacgaggcatgggacaggctgcaaacagcccgtccggcccgctagaaaaaatttttagggcccgctccgcacatcccggtctgtacccacaccttcaagggtgtgaagggaataaaaacacacctaacaacaactttgtttcatgatttggcgcgtcggaccctttctgaccgatgtcgtgcgcaacaatggacccatgagttcgcctaccaagatgcgccggaaggggacacgcggcccgaaacctcgcagcgacgaggagctaacggctgtgatgttccgcgtcccagagtcagtggccgaacgtgtcagcgatatggcttgggagctgaggctctcccgatccgatcttgtgggctggtcggccctctatgcactcaactcgatgctcagacagcgcggagaggacacgattccggttccggagtatctggacaaggccgtgctcgctgcgttgtatcccgatgggttgcccttcgacgaggacaccgaggagccgggcgagaatgccgggcaggaggagcttgcgatgactggatgagcccgaacatggttgaaggccgccccgccaggcgaccttcaatcaatggtttcggttgtcagctgcagccacccttgccaggtgctgtggttcttctccagaggaggagggaccgccatgaagacccagaagacctagaagatccaaaagaaccggtttcggctgttgcttcggtcttcatggtagctgatagcccgcgtcgttggaagtgcgacgacgccgatcctcatcggtatcgcaccctgttccagggtcgagaatgtgaaggattaacaaccatgacaagtcatgagacgccctcccggagggcgtcatgaccgctttaattcaagctctgccgacagctgaactgtctgctggacctggtgctagcagtccagctagaccctctgctgagggcttcatcaagat

SEQ ID NO: 284 - DNA, 3282 bp, Propionibacterium acnes
  source 1..3282: mol_type = genomic DNA
gagccagttatcctcatctacgacgatggctatgaactcctgatccacgccatgaaagcccgccctcagtatctgagctacttcgctatctagtgttgttgggcgagttgaactcaacttttctccgacgcaagcgccaataaaaggctgatccatccgaataccaccaaacacggctgaagtgtggaacagattcagcaagacagggtgcggtgctcgggtgcgttggggagatgaggatattcaggcttctggcgggatgtggcttgatgacgtccaggatcaccggttcggttttgaaggtgccttgcattaatgtcgacagggtcgtacgactcgaggattggatcgaccagcccgttgcgtctgaagaacttcatccaccccggtggagctccggccgcgtactggtgcaacggatcattagcatgggtagcgtgagtatgccttcgatcgtggtcagtgctgtcatcatccaagattctgacgggcggcttctcactgtccgtaaacgaggcgccgaggcattcatgctgccaggcggcaagccggagcccggcgaggactcgcgtcaggcagtagtccgggaagtgcacgaagagctcggcgtcgcattgtcttccgacgacctgcgtcgggtgggagtgttcaccacgcgagcagcgaatgaggccggccatcaggtggtggcgacgattttcacccacaccccggttgcggtgagtgagccagctgctgagatcgagcagattcgttggctcgattggagtgtcgacgccctgcctgatgacctggccccgctgctggtcgaggcagtcatcccgtggctgcggcgccgtatccggtcggtcgctgtattcacgggtgcgaaggatggaaccgaccctcattatcgtgtcgaagcaaccgccttgggccggggtctcgcacacgccgggatcaccctggtttatggcggcgggaaggtcggggtgatgggtgctgttgctgatgcggccctcgctgctggcggcgctgtgatcggagtgatgccgcagcacttggtggacggggagatcgcccatcctagtctgactcacctcgaggtagtgcggactatgcatgagcgcaagcagcggatgagtgacctagctgacgcgttcgtcgcgctacccggcggcggcggaacccttgacgagctattcgaagcatggacatggcagcagctcggtgtacacagcaaacccgtggccttgtacgactcgaccttctgggcaccgctgaccgcgctactcaaccacatgaccatcgaaggcttcatccgccctgaggaccgcgcctcgctcgtgatcgccgataccatacatcagctgatggccgatcttgagggatggaccccaccaccaccgaagtggcgctcgtgacatagaacaaatgattctgactatggctcattgacatctgcgcagcggctactagctccattgacttcaaatcgggccttggccgaggctcggttcaggtggcccggaatggatccccacaaattgaatgctcatgatcgaggtgatgaacgcccactctattgtcctacgcccggttgtatccagcgagcaattgaaggtgctgcgcctgttggtcgaccaggccgagccactcatcatcgacgggcgcatcttgtacgaggcatgggacaggctgcaaacagcccgtccggcccgctagaaaaaatttttagggcccgctccgcacatcccggtctgtacccacaccttcaagggtgtgaagggaataaaaacacacctaacaacaactttgtttcatgatttggcgcgtcggaccctttctgaccgatgtcgtgcgcaacaatggacccatgagttcgcctaccaagacccgccggaaggggacacgcggcccgaaacctcgcagcgacgaggagctaacggctgtgatgttccgcgtcccagagtcagtggccgaacgtgtcagcgatatggcttgggagctgaggctctcccgatccgatcttgtgggctggtcggccctctatgcactcaactcgatgctcagacagcgcggagaggacacgattccggttccggagtatctggacaaggccgtgctcgctgcgttgtatcccgatgggttgcccttcgacgaggacaacgaggagccgggcgagaatgccgggcaggaggagcttgcgatgactggatgagcccgaacatggttgaaggccgccccgccaggcgaccttcaatcaatggtttcggttgtcagctgcagccacccttgccaggtgctgtggttcttctccagaggaggagggaccgccatgaagaccaagaagacctagaagatccaaaagaaccggtttcggctgttgcttcggtcttcatggtagctgatagcccgcgtcgttggaagtgcgacgacgccgatcctcatcggtatcgcaccctgaaacagggtgttgaacatgaagggttgaccgctatgtcaagccatgagacgccctcccggagggcgtcatgaccgctttaattcaagctctgccgacagctgaactgtctgctggacctggtgctagcagtccagctagaccctctgctgagggcttcatcaagattcatcacgacctcattagtgcgggcgtgtcgggtaacgcgatggcgttgttcgtcgcgttacgtaaccagcccggctgtgatcagtggacccgtcactcgtacctgcggctagcccaatggtgcggctgggatgggctgtcggaggcggcgggctgtaagcgggtgcagcgggccgctgctgagctcgctagcggtggttggctggaatcgcgggtcggccatgatcgtcgcaccgctaagacgctggtgtggcatcggttgaccagccccgacaccgaccgctgggagcaattgccgcggattgtgtgggcgaggatctgccagatcgccggagagacgtcgggagagtgggtgaggcattggctggtgtggcggatgctggccggtcgtactggtgtggctcaggcccctacgaccatcgtggcccggttcctgggctgttcttcgcgccaggtctcccatatccgtggggctctcgttgatgccggtctgctcggctgtgacgaggtgtcgggggcggcgagccgggtgtggttcccctcgatggccgaggagtgtgcagcggatcgtgaggtggtcgatggggccgtcgtcgatgctgaggtgggctctggtgaaggtgtcgaggagggcggggaacccctgtcgattttgtccacccacccctgtc

SEQ ID NO: 285 - DNA, 3093 bp, Propionibacterium acnes
  source 1..3093: mol_type = genomic DNA
gtcgagaatggccttgaggacgagggcttggattgtggtgtcattctgggctgccttgaccttcagtccaacgccgatgtcccgggggattctggtctgcaacttgaacaggtctgcctccttggttttgaacagtttggttgcagggttggcaacgggctgttcttggcgctggcgtccaaggttgcttttctttcgggcggtcatgacatcatctccaacagttcgtcggcaacatcggcgaagaaggcgatagtttccggctcaggggtacagccgtaggcgcgcttgatgacttgacgcttggggatgacgtgatcgaccaactgcgtctgggagtcgttggctagaaggtcgcgaccttccttgaacagggaggtattcggttcagctttggaaagcagcaccacgcgcggggttcctgcggcggcgtcgtgcgtctcccaggtgcgcgccatgtcgagcccggacgtgtcggtggggatgataaccagatcggcggcgcgaatggcggcggtgatgatgtcaccgttgcccggcggggtgtcaatgatgacaacttcttcgggtccggcgacgaggtgctggagcgtcgccttgttggccggttccacggggaaccccaaggggtcggcgttactcagtgtgcactcggcccaggatgatgctgacccttgagggtcggcatctttgacgcggaccatacggcccgtctcatggagagctgcagccagcaggatcgctgccgtggtcttaccgacgccacccttggcgttgataatgctccagatcatggtgacacctttcagtgaggatgcatatcagtttacctgcaaggagtaaagacggcaagcagttatgccgtttctgcggcaagccgtcttgcatccttggatgtatagatagttgtctacttatggttgtggatcgtggtgtctcgtaccaggatttagtgtgctcgctgatatgcacgactttcgggcggcctgatctggcggtggtgccactaacccaggagtctgatccgcaaggtgtcctcgactttgaggaaggggtctctgctttcgtgttgacctaaagtcaacggccctgggcgatcactgaatcctaatatctttgtatccttccctgattgcatcttagcatccttgaattcaaacagggatggagccatgctgttttgacgacatggatgcactggggtttggttgttgccgatgcggagcgtcaggcggcccgggacgccgccaccgccgacacgctgcgggagatcgtgggactgctgggccggggcggcgaggtcccgcccgccaagacggggcgtaagacgaccggcaggccggccccggcccgcaagtcgtcggccacgcagtaaaggcagggatccgtccctacgcagagagcggaggcagatcctgggggatccgactcttcggttccgtgatcttcccggagatcttcccggatcccccagggctcatcctgatacggggtccgccgacggaccccgtatcagtgggggcgctgccaccagtgatggcgggcgggtcggtcggcgtctaggccccgcccgatggtcgcctggtctacctcgcaggcccgtgctgttgccgaggccgagaacgtctgcccacttgttgccgattcagtcccctctccgtctgccatgtcgccaacctttcctatctggcgtgctcatggacatgcccgggcacgccctcgctgctcagaggcctgctcgttccacctctggccgcgaaccgtatttctgctgaccactcctcgtgcgtgaatatttgccagccttggccattcatatttggactactctgcaccagatatcggactgggaaacctcttgcacatctctaattgtcatctattcgttgggcgcgcgctgttagatcgtgatcataccaatcagaagacaaagcgacgcccttttgagcggcttttcgaacgattctagaccgcgctatatcagcatttctaccgcgcggccagagtgctacactaaattcctctctgcaatccttaagtccattctttacttcctcatccaatttctgcgacagcatttttatggaagcatcgcactctgactcatcatcaaatgcctcaattgcgtgcgttcgccattcacggcgcgtattatcgtagccgtaatgaagtattacccaccgatccacagaatcatcgttaggatctacaactgtcatgaatggcccaactctcgcgctggtgtattctcaattgcagttcagtgactttacttgaccagtcccggatttagtagacgtagacggagagtaccccgccgggaacttgactgacatcactgctgtaccgtactgctttcccgggtggcaaccatcgtaagcagcatttgccgtgacgtacctagtgctctttctctgagtgccggtaatcgccttatatggtacaggtgggtgaatcgtagccgttacggataccgatgacacgtttgcatcacatgaagctgtggcgacataattagttgtcccattgacatgatgagagtcgtggacatactgtcgaggatcgagagtgcaggttattgttgacgccgttgttctggtaccagctgctttcgagctctttgttgcagttacagtctgcggccctgaaggttttactgacgcgactgatgtgttcgcgtgttttgcggcagtgctttgatttggttgtgcttgtgtagcagttgctgatgtcgccagtgatgcccccattaccatagctgtgattatggcgtagtctttacgcttcattgcgcccccaaataagcatgttagtttgctattttgaataggatacgagacatcgccatgacttgtcaagggaagaagtaaaaagaatcgggggggtatcaagaaagatgtgctttcatcaggacgaaagcggatgggtccgttcgacttggtgacgaatgatccggccttgcgtcgcggagaccaggccggcgagtttgtcgagcagggccgccgtggcctcatcgtcgggcacatcactaaagggacgaacaaccatgacggctagggccagaaacgaccggaactgaatcgcatgtggacc

SEQ ID NO: 286 - DNA, 2920 bp, Propionibacterium acnes
  source 1..2920: mol_type = genomic DNA
acccttccagcccagcaccacccactacaccgacacgatccacgaagctgaaaccgaacctcccatccccgtccgaaacatcaacgaactcatcaaccccaccaaccatgcatgaacgcacgatcgcctaccggccagccttcctgcgcgacgtgaagcggctcaaaaacaagcactacaacatgaacacacactcaaatgggcggtaaggtcacgaagtcgacgtggctgcctcacggatggcttcggcgagctcttggggtcgactccacatgggccagtggccggttggcagatccatcgcggtgaagttggtcaggtgcgcgacggcgctgaacatcggattgcctgctgcggccagctcgaggacctggacgctgggaatggagcagcagatcaacgtggttagtacatcatggcgagcgctattggacagcgcgacccgtgcccgggccacttgcgcgggttcaggaaccgcccgtgcccggaaccggtcaaggtgctcgttgctgaggccctctaaactggcctgcttgccgagagtatcgaagtcaggaagtggcagctcagctgtttcctcaggtagatctggtgcgaaggcacctccatcgctcatgggaccggagtccacccagacgatccgatggaccaactctgggtgcctgtctacaactaggctcaccggcccgttcgcgccactgtgtcccaccaggaccgcatcgccgcccatctcgtccaggatggctgagatggcgtcagcttggtcgtcgagcgtgcgcgtagtgcgctgggtgtcctccggatcgagacctggcagcgtcagccccacggctcgactgccagcagtgttcaataactcgactacctcgtcccaagcccaggctccgagccagtaaccaggaacgaggacgataggccgatgctggtcaggtcgcgatgttgaagtcatggagacatagttgcacagtgcgcggacaagggagtggcactatttctggcatgaatttagatctgggtgtccggtgaggcgatcagaacgcctccatgtactgtccgagtgtctaggatgcagcggacacagtcgagcagctggctcacaagtttccaggtgtccttctgcccctatgagggaagtcggctgctctcgcaacctttgagggctgctctggggtcggaaccagttacagatcgttcaagttccgggaactaccgccggtcacgctgattgattcccgggcgatctcgcttctgacgacagtggtcggtgaccgagaggagtcctactctgaccccgctgctgcggtgagtaaatcacgggcgtcccggatccggccacccgtccaagtgccagccagcttgatcggctaggcatcgtcaaggagcgacgatgaggtgatgatgcgatgtgagcgcaccgcgaagtgaggtataaagaagccttcccgggcgcatgcgtcgcccaggaaggccaggttggcccctggacggctgaatggttgggcggatcaggctgtagcggagacgtgcagtacctcgtaggcgatggcgttggttgggctctggtctgcatcgtggctactgagttcgacgaggatgacggtccaggtggtgatgtcgacggcggtgacgcgggcgatggtggaatcagtggatgctgcaaggaagtcggcggttatgtcttcgatgcagtgggacggagcagtgctggtgggcaggggcacggtcttgacggtcaggcttcgggcagcagagtaatcggcggttccgttaacaagctggtggacggtccagtcctggatcgggtgccggccgaagtcgcgtacgatagccgagtaaccaagttcgccccagcagaactggcgcatcccctctatgtcgcgccagacgtagaagggcgcgtaggagttctggggtgcgcctttgaccttttcttggatgaggtaggccttgaactccagtccatggtagccgtccatgaggtgtccagtctggatgacgcggtcgcggatgatctgcatgtcatagtcggtgggcagggtgatctgatattgcatggcgtacatcagcggttctccttggtttcgtgggagtaggtcgtgggggtgacgggttcctgccaatcgatggttgacaagtcgtcggcggcttgttggtaggtaaggtggatcattggctgtttgagtgcagcgccatgccagtgtctctggccggcgtcgatccagatggattcgcccttggtcaggtgctggggtgcttgtccttcaatatggaccagggcaacgccgcccgtgacgtagaggccctgtcccttggggtgtgtgtgcctcagcggcaaacgtgacggcgtgggcggcacgcccggcgtcttccgtggcacgatcggccggatccatggcggcgcgcagctgctgttctgcagccaggcgtccaggtcacggcgggcagcatcgacacccagggcagcctcgacggcttcagggctacgacgctggccgggctggttgaccgcagaccactggtgccgggcgtcgtccagatcatggccggcggcgtcgatgagggcggtggtggcttcggcgcagcatcgcctgatccactccgaacgtgacaggccagctgtctcggcggcactgtcaatgcgcgccaggagagatttcatgggcgctcatctgtagcctccagataggcgttgatgtagcgcagagcctgatccgtcatgtcgatggcggctgcctcggcagacgacacaacgggctgtggatgataagaccacccaacatagacggcgaacatcaatttctcgacagctttcatgaggtccccggcggcaaccgcatccgcctcatcatccgaggagaaccacttcaggtctgaacggctgtacatagcccctaggtcctgatgtgggtcgaggtccttg

SEQ ID NO: 287 - DNA, 2918 bp, Propionibacterium acnes
  source 1..2918: mol_type = genomic DNA
acccttccagcccagcaccacccactacaccgacacgatccacgaagctgaaaccgaacctcccatccccgtccgaaacatcaacgaactcatcaaccccaccaaccatgcatgaacgcacgatcgcctaccggccagccttcctgcgcgacgtgaagcggctcaaaaacaagcactacaacatgaacacacactcaaatgggcggtaaggtcacgaagtcgacgtggctgcctcacggatggcttcggcgagctcttggggtcgactccacatgggccagtggccggttggcagatccatcgcggtgaagttggtcaggtgcgcgacggcgctgaacatcggattgcctgctgcggccagctcgaggacctggacgctgggaatggagcagcagatcaacgtggttagtacatcatggcgagcgctattggacagcgcgacccgtgcccgggccacttgcgcgggttcaggaaccgcccgtgcccggaaccggtcaaggtgctcgttgctgaggccctctaaactggcctgcttgccgagagtatcgaagtcaggaagtggcagctcagctgtttcctcaggtagatctggtgcgaaggcacctccatcgctcatgggaccggagtccacccagacgatccgatggaccaactctgggtgcctgtctacaactaggctcaccggcccgttcgcgccactgtgtcccaccaggaccgcatcgccgcccatctcgtccaggatggctgagatggcgtcagcttggtcgtcgagcgtgcgcgtagtgcgctgggtgtcctccggatcgagacctggcagcgtcagccccacggctcgactgccagcagtgttcaataactcgactacctcgtcccaagcccaggctccgagccagtaaccaggaacgaggacgataggccgatgctggtcaggtcgcgatgttgaagtcatggagacatagttgcacagtgcgcggacaagggagtggcactatttctggcatgaatttagatctgggtgtccggtgaggcgatcagaacgcctccatgtactgtccgagtgtctaggatgcagcggacacagtcgagcagctggctcacaagtttccaggtgtccttctgcccctatgagggaagtcggctgctctcgcaacctttgagggctgctctggggtcggaaccagttacagatcgttcaagttccgggaactaccgccggtcacgctgattgattcccgggcgatctcgcttctgacgacagtggtcggtgaccgagaggagtcctactctgaccccgctgctgcggtgagtaaatcacgggcgtcccggatccggccacccgtccaagtgccagccagcttgatcggctaggcatcgtcaaggagcgacgatgaggtgatgatgcgatgtgagcgcaccgcgaagtgaggtataaagaagccttcccgggcgcatgcgtcgcccaggaaggccaggttggcccctggacggctgaatggttgggcggatcaggctgtagcggagacgtgcagtacctcgtaggcgatggcgttggttgggctctggtctgcatcgtggctactgagttcgacgaggatgacggtccaggtggtgatgtcgacggcggtgacgcgggcgatggtggaatcagtggatgctgcaaggaagtcggcggttatgtcttcgatgcagtgggacggagcagtgctggtgggcaggggcacggtcttgacggtcaggcttcgggcagcagagtaatcggcggttccgttaacaagctggtggacggtccagtcctggatcgggtgccggccgaagtcgcgtacgatagccgagtaaccaagttcgccccagcagaactggcgcatcccctctatgtcgcgccagacgtagaagggcgcgtaggagttctggggtgcgcctttgaccttttcttggatgaggtaggccttgaactccagtccatggtagccgtccatgaggtgtccagtctggatgacgcggtcgcggatgatctgcatgtcatagtcggtgggcagggtgatctgatattgcatggcgtacatcagcggttctccttggtttcgtgggagtaggtcgtgggggtgacgggttcctgccaatcgatggttgacaagtcgtcggcggcttgttggtaggtaaggtggatcattggctgtttgagtgcagcgccatgccagtgtctctggccggcgtcgatccagatggattcgcccttggtcaggtgctggggtgcttgtccttcaatatggaccagggcaacgccgcccgtgacgtagaggccctgtcccttggggtgtgtgtgcctcagcggcaaacgtgacggcgtgggcggcacgcccggcgtcttccgtggcacgatcggccggatccatggcggcgcgcagctgctgttctgcagccaggcgtccaggtcacggcgggcagcatcgacacccagggcagcctcgacggcttcagggctacgacgctggccgggctggttgaccgcagaccactggtgccgggcgtcgtccagatcatggccggcggcgtcgatgagggcggtggtggcttcggcgcagcatcgcctgatccactccgaacgtgacaggccagctgtctcggcggcactgtcaatgcgcgccaggagagatttcatgggcgctcatctgtagcctccagataggcgttgatgtagcgcagagcctgatccgtcatgtcgatggcggctgcctcggcagacgacacaacgggctgtggatgataagaccacccaacatagacggcgaacatcaatttctcgacagctttcatgaggtccccggcggcaaccgcatccgcctcatcatccgaggagaaccacttcaggtctgaacggctgtacatagcccctaggtcctgatgtgggtcgaggtcct

SEQ ID NO: 288 - DNA, 2920 bp, Propionibacterium acnes
  source 1..2920: mol_type = genomic DNA
acccttccagcccagcaccacccactacaccgacacgatccacgaagctgaaaccgaacctcccatccccgtccgaaacatcaacgaactcatcaaccccaccaaccatgcatgaacgcacgatcgcctaccggccagccttcctgcgcgacgtgaagcggctcaaaaacaagcactacaacatgaacacacactcaaatgggcggtaaggtcacgaagtcgacgtggctgcctcacggatggcttcggcgagctcttggggtcgactccacatgggccagtggccggttggcagatccatcgcggtgaagttggtcaggtgcgcgacggcgctgaacatcggattgcctgctgcggccagctcgaggacctggacgctgggaatggagcagcagatcaacgtggttagtacatcatggcgagcgctattggacagcgcgacccgtgcccgggccacttgcgcgggttcaggaaccgcccgtgcccggaaccggtcaaggtgctcgttgctgaggccctctaaactggcctgcttgccgagagtatcgaagtcaggaagtggcagctcagctgtttcctcaggtagatctggtgcgaaggcacctccatcgctcatgggaccggagtccacccagacgatccgatggaccaactctgggtgcctgtctacaactaggctcaccggcccgttcgcgccactgtgtcccaccaggaccgcatcgccgcccatctcgtccaggatggctgagatggcgtcagcttggtcgtcgagcgtgcgcgtagtgcgctgggtgtcctccggatcgagacctggcagcgtcagccccacggctcgactgccagcagtgttcaataactcgactacctcgtcccaagcccaggctccgagccagtaaccaggaacgaggacgataggccgatgctggtcaggtcgcgatgttgaagtcatggagacatagttgcacagtgcgcggacgagggagtggcactatttctggcatgaatttagatctgggtgtccggtgaggcgatcagaacgcctccatgtactgtccgagtgtctaggatgcagcggacacagtcgagcagctggctcacaagtttccaggtgtccttctgcccctatgagggaagtcggctgctctcgcaacctttgagggctgctctggggtcggaaccagttacagatcgttcaagttccgggaactaccgccggtcacgctgattgattcccgggcgatctcgcttctgacgacagtggtcggtgaccgagaggagtcctactctgaccccgctgctgcggtgagtaaatcacgggcgtcccggatccggccacccgtccaagtgccagccagcttgatcggctaggcatcgtcaaggagcgacgatgaggtgatgatgcgatgtgagcgcaccgcgaagtgaggtataaagaagccttcccgggcgcatgcgtcgcccaggaaggccaggttggcccctggacggctgaatggttgggcggatcaggctgtagcggagacgtgcagtacctcgtaggcgatggcgttggttgggctctggtctgcatcgtggctactgagttcgacgaggatgacggtccaggtggtgatgtcgacggcggtgacgcgggcgatggtggaatcagtggatgctgcaaggaagtcggcggttatgtcttcgatgcagtgggacggagcagtgctggtgggcaggggcacggtcttgacggtcaggcttcgggcagcagagtaatcggcggttccgttaacaagctggtggacggtccagtcctggatcgggtgccggccgaagtcgcgtacgatagccgagtaaccaagttcgccccagcagaactggcgcatcccctctatgtcgcgccagacgtagaagggcgcgtaggagttctggggtgcgcctttgaccttttcttggatgaggtaggccttgaactccagtccatggtagccgtccatgaggtgtccagtctggatgacgcggtcgcggatgatctgcatgtcatagtcggtgggcagggtgatctgatattgcatggcgtacatcagcggttctccttggtttcgtgggagtaggtcgtgggggtgacgggttcctgccaatcgatggttgacaagtcgtcggcggcttgttggtaggtaaggtggatcattggctgtttgagtgcagcgccatgccagtgtctctggccggcgtcgatccagatggattcgcccttggtcaggtgctggggtgcttgtccttcaatatggaccagggcaacgccgcccgtgacgtagaggccctgtcccttggggtgtgtgtgcctcagcggcaaacgtgacggcgtgggcggcacgcccggcgtcttccgtggcacgatcggccggatccatggcggcgcgcagctgctgttctgcagccaggcgtccaggtcacggcgggcagcatcgacacccagggcagcctcgacggcttcagggctacgacgctggccgggctggttgaccgcagaccactggtgccgggcgtcgtccagatcatggccggcggcgtcgatgagggcggtggtggcttcggcgcagcatcgcctgatccactccgaacgtgacaggccagctgtctcggcggcactgtcaatgcgcgccaggagagatttcatgggcgctcatctgtagcctccagataggcgttgatgtagcgcagagcctgatccgtcatgtcgatggcggctgcctcggcagacgacacaacgggctgtggatgataagaccacccaacatagacggcgaacatcaatttctcgacagctttcatgaggtccccggcggcaaccgcatccgcctcatcatccgaggagaaccacttcaggtctgaacggctgtacatagcccctaggtcctgatgtgggtcgaggtccttg

SEQ ID NO: 289 - DNA, 3086 bp, Propionibacterium acnes
  source 1..3086: mol_type = genomic DNA
ggttacccactcccgctcatcggagttgtcggtggcaataatgcgcccgccccgggccgcgatggctgcgcacagccgcttctcggccatcgtcttgcccgcgcccatcttgccgatgaacgccaccgtgttgcctttctgatcctgagtgtcggcatgcaaatcgaggtaggccagcgactgcaacggggagcctgtgaccacagccaacgggatgccggtggtacggcccaaccggtactcaaccaccgggatagatgcggcgaacgcggaggcgtgagtcagctgacggtaggcgttaagcgaggaggagaaccggccaccgggccgggcagcccacagcaagtcctcctgacggcccacgggacgcacccacgtgaagtcaccgaacaccggatcattgacgaacgctcctgccagctcctcggtggtctcaaagtcaggagacgagacagtgacggtgataagagcctggatctcgacctcacgctcatcggcggccagctcggcgttgtagtcgacgagcacctgagcggaatgctcgatagacatgagggtcgaagcctgggtcatctcaccgccctcaacattgtcgagctgatcgacggtttggcggatggcccgctgatttttctgcatcgcagcgtgacgggtccgggccactccccggatcgccacgtcgaccggcacgccagtgtcgtcgatacggcccaggaactcgtaggcaggccacgtcatcgtgcggggcaccttacccagcacgatatgggactggtagacggtctcgccggtgtcggcaccgattttgaggacgcgacgattccacgcctgagccgtccgggacatgtgggagactcgcttgtcatcctcgctggccagcaggtcggaggtcgcggcctcatcgatgaccaactcccccagcgcggcacgtccaacctcatccatgagggcgattccctcgccaggggcatcatcacgcaaccgggtcgggtggcctgacaggtgctgccgaagccagatctgttcatcaacggtgaccgggcggggttggaacgctgccggcagtttcgcaccgaattccttagcctgacggagggcccactcccgtgcgacacggccaggagcggtggtcatgagtccggcagcttcggtgattttgttgagggcggcggtccaggcggtgtgggtgcgtattttctggtcttggttgagtttgatcgataggaaccacacgcgccggcctagggatgcggtttcaggctggtcgagggtggcgtcgatttcgtcggcccacacggggtgttcgctcaggtcgaggccggcggccatggcgtcgacgatttctgtggggtcggtccaggtgagggccccgttgaggcagaactcgtggcgggcgaggtggcggaataggtcgcggtgagctgcggcgacggtgagggaggcgttctcggtgacgggtcgctggaggggagtaagtcgccaagtggcccagatgtcgccggtggaggtccagacgaggttgtcgaagaggaaccgttcggggatggacatcatgactccttttcggcggcggcgaggaaggcttccaggccgctgcggcgtacagcgttcccggtagggtgcaggggttttctgggggtgggttcagatttcgaatgtgggaagagtttgtggatggtatcggtgtcctcggcgagggcttggtcgagcaggcaggtggccggggtgtcggtcatctcgtccagctcgtcgatcatctcgtcgaggaggttgggggtggtggatgcggcccacacaggtgggatagccggtgcgggtcgaggcggtgtggggaggcggagtttggtttggccccagaggggtgtgtgggtcatgccggcgggagtggtggcggcgtgagtggtcacacgccaccagcccgacagccatgccagaggtgaccaggtccagtcgatgcgaccaacaacgaactgggcgagccatccggcagccagcgcgaaaatgaaaccgcggatggtcatgcccccgtcgataattttgaagcccatcatcgcggcaggaactacgccgccgacagcgagcacctgatagatcgtgtagggcccgccaggaatccttcgacctgaggaatccttgccgataatgcggggctgctggcgggcctcggtgtgccactgaatatccacgatcagctcttgcccaatccttgcatcatctgtccgaagaattggatcgcgttaccttcgataagccagtgcgccataccacacacaaacagcatggagacgatcttggccaggctcataccgtgtttgaagatgttgaacgcggcaatgcccacgactacgaccatggcgacggctcgcaccgcggactgaccttcacctgccttgatcgtcgtccattcgaagaggttctgcgattccagtggcagcaggaggaattgatcgagcatgagaggttttcctttcaggaagccgaccgggatggtcccggtactgacgggctggacggcacgggtgtgccggccaggggcagaaggcgtgacggctggtcgagggcggcaacctcccagcggcctgcacgactgacaagagtcaggccgtactggctagtccgggtagtggattcgtcaccggtgggctggcatgtcacggtcaccgtgacggtaatcttctgccgatctgagggggtggggacctcgtcaggccccaccacatgagtggttttcaccgatacacacggggctgggtcaaccgcggtgaaagcggtccccgggctactccatctcgacaggtcagtattcccggtcagcatggcggccaagaaacccgaagaggtctgggcagccgggtcagcaggacgaatctccgaggagtccacgtcgggggctgaggccggtgcaggcatggggatctgcccaggtagacgcaaggcgatggccttgccgccggcatcgacgtggaccggaaccgaccaggcctgtccgctcccggattggccgcccatggtgaccacggtgacctgccacaggctcggatcagacggggagacggtagcgtcataggcggtgacggtggtgggcg

SEQ ID NO: 290 - DNA, 3075 bp, Propionibacterium acnes
  source 1..3075: mol_type = genomic DNA
attttgtccacccacccctgtcgattttgtccgccaagtattagacaaaccattagacagtgaattagaccttgggtcgcgtcagcgtgttagctcaccaacgcgcgcgcgcgcggcggccgagccgccgaagccaaagaaacccataccaccaacgcctgaaccagcagcccccgcttcagacagtcctgtgtcagcgcacgctgatgaggctgccgagttggcgtggcggttcgtggggtggtgtcctcagctggtaggggcaccgaagaaggtgcgtggccagctccgtcagatggttgccaagcagatccgtctccatcgtgcctggctggatgtgccggcgttgactgttgccgctgagcgagtccgggaaatcggggcgctgggtgatcggcactgcgagatcgttcgagacgagctgcacggggtgatcgccgaccagaaggccgcccccgcccgccccgacgccctgcacgcgcgggagcccaagtggtgggacgacgtgtactacgaaggaaacacaaccgtgtggtacgactctgacgaaaccagtgacgacgacgaggcgtggaaccggtcgcaggtatgtcatgttgctgagcgtgacgacatggctggcgggattgctaccaacctgctggcctcccacgctgatgatccgatggcctggctgactcgccgtcaaaccatgctgatggctcgtttcccccacgcccagaacgaggtcatcgcgatgtgccacatcgtgcgcaccgccctggaggccgacatggccgccggaacccggtgggaggactgatgagggtctcccggcgcgccctcatggccgtggcccgtgccgacgctgccgcagcagaccatgccaccggccgatgggtggccacagccaacgccaccgtcgcccggctgaccggactgtgcgaacgcaccgtccaatacgcccgcgccaccctggtccacctgggcctgtgccgcgtcgtggccaccggccgctacctcaccgccgacgagcggcgcacggctgctcgcacccatggcggccgccagatgcgcgccgcctccacccgcgtcctcaccatgtcctgcgcaatcgtttgcgccctaccccgaaggggtcaccactacaggaaagttaagttcctagatggtcaccaacgcacgcgcaggcgcgtgcgaaggccagcaacaccagagaagaaacccctgtggctgcaaaaactcgcagccctcctcgaccagcacctgccctggctggtgagaaaccatcacatcggccgactgtgccacgccctcaccgccctgggcatcgacgaacactggcaacccgcagacctcgacgccctcctcgacgccatgaaccgcaggaaccgtcgcctcggcctcgacgtgccatgcgccgacgaccagcacaaccccttgggactgttcatccaccaggcccgagacaccctcacccacgacaacccccatgaacgccgcctggcccgcgaacaccaccgcgcccaactcatcgacgaccaactccgccgccgcgcagaaaccgccacctgcgcagcccgcctcgcagccgagcacgccgaccccgactaccagacccgccgtcgtgaacgcagggaaaccctgcgagccacactcagggccgcccagcagcatgtcaggacacactgatacccgctcatacacacaccgtgaaacacgacaagccacctgacagtatcagctgcaagacgcatgacaacatagaaggacatgatgaaatacacatagacacaaccccgcacagcagtttcgcaacaaatcatgatagtctcatggcagtatcgcttgatacacacatagcatcactcccacataggcagttatgctgatatactcctactaggttatccgtccaacatgctgagtgggttcctgtacagcatgaaaggagcatggcatgatatgggccgttctcaactgcaagggtggtgtcggcaagacgaccagtgccctcctgctggcggcagccgccgccaagcagggccacaccaccctggtggccgacgctgacccccagggcaccgcatcccagtggtcagccctggcaaccaaaaacgacgaacccctgcccttcccggtgcaagcggtcaacatcgccaccatggaggcactgcccaccaccaccgacgcccatgatctcatcctcgttgacacacccccctcggcaggcgatctgatgttccaggcatgccgcatcgccgacctcatcatcatccccaccgccacctccggacccgacatctcccgaacatgggtcaccatggacgccacacaaggcacaccacgcgcgatcctcctcacccaaaccgaacacaaccgtgtcgtctaccgccaagctcgcactgccctcgccgccgacgacaccgtcgttctcctggaccacgacatcccccgccgtgaatccatccgcacagcatggggcaccaaccccccagacgacgtcatcacctactacctgcccgtcctcaacgaactcatggaggccctgtcatgaccaccaagaaaaccgacccattcgcccgccagaaagcagcagaagaccgcgcccgccaactccaagacgaagcccaacgccacgcccaccccaaacgcgtcatcggccccaccgcacgattccagttcgtcctgccagccgacgtgctcaccggcctcaaacacctcgccctcacccgcggcaccaccgcccgccaactcaccctcgacgccctcgacaccgcctacggcctcgacaccctcgccaacagcgggaagaaaacccacccatgacccgtgggtccccctgccaccaccccctcgacggcaactgtgtgcgagccacaggcccgcacacaggcggcagcccagtgccgtccccgccaggaaaggaactgaacttttctggagtgctggctccctatcaccccttatggtgctatcagatccagtagcgccagcccgagaggaaacccatgagctacatcgtccgcaccggaaatctagccggcacccccgagctgcgcgaggggtagccgacacggcggaccgtgcccctga

SEQ ID NO: 291 - DNA, 2821 bp, Propionibacterium acnes
  source 1..2821: mol_type = genomic DNA
ttcaagttccgggaactaccgccggtcacgctgattgattcccgggcgatctcgcttctgacgacagtggtcggtgaccgagaggagtcctactctgaccccgctgctgcggtgagtaaatcacgggcgtcccggatccggccacccgtccaagtgccagccagcttgatcggctaggcatcgtcaaggagcgacgatgaggtgatgatgcgatgtgagcgcaccgcgaagtgaggtataaagaagccttcccgggcgcatgcgtcgcccaggaaggccaggttggcccctggacggctgaatggttgggcggatcaggctgtagcggagacgtgcagtacctcgtaggcgatggcgttggttgggctctggtctgcatcgtggctactgagttcgacgaggatgacggtccaggtggtgatgtcgacggcggtgacgcgggcgatggtggaatcagtggatgctgcaaggaagtcggcggttatgtcttcgatgcagtgggacggagcagtgctggtgggcaggggcacggtcttgacggtcaggcttcgggcagcagagtaatcggcggttccgttaacaagctggtggacggtccagtcctggatcgggtgccggccgaagtcgcgtacgatagccgagtaaccaagttcgccccagcagaactggcgcatcccctctatgtcgcgccagacgtagaagggcgcgtaggagttctggggtgcgcctttgaccttttcttggatgaggtaggccttgaactccagtccatggtagccgtccatgaggtgtccagtctggatgacgcggtcgcggatgatctgcatgtcatagtcggtgggcagggtgatctgatattgcatggcgtacatcagcggttctccttggtttcgtgggagtaggtcgtgggggtgacgggttcctgccaatcgatggttgacaagtcgtcggcggcttgttggtaggtaaggtggatcattggctgtttgagtgcagcgccatgccagtgtctctggccggcgtcgatccagatggattcgcccttggtcaggtgctggggtgcttgtccttcaatatggaccagggcaacgccgcccgtgacgtagaggccctgtcccttggggtgtgtgtgcctcagcggcaaacgtgacggcgtgggcggcacgcccggcgtcttccgtggcacgatcggccggatccatggcggcgcgcagctgctgttctgcagccaggcgtccaggtcacggcgggcagcatcgacacccagggcagcctcgacggcttcagggctacgacgctggccgggctggttgaccgcagaccactggtgccgggcgtcgtccagatcatggccggcggcgtcgatgagggcggtggtggcttcggcgcagcatcgcctgatccactccgaacgtgacaggccagctgtctcggcggcactgtcatgcgcgccaggagagatttcatgggcgctcatctgtagcctccagataggcgttgatgtagcgcagagcctgatccgtcatgtcgatggcggctgcctcggcagacgacacaacgggctgtggatgataagaccacccaacatagacggcgaacatcaatttctcgacagctttcatgaggtccccggcggcaaccgcatccgcctcatcatccgaggagaaccacttcaggtctgaacggctgtacatagcccctaggtcctgatgtgggtcgaggtccttggaatgatggaagttcctacacacccatcgccaaagacctcaacatggacaacgctaccttcaccactccctcatctgtgaagagccagtttatgcacggtgttgaaagaggcgtcggtctacgacgaatgcgggttaatggtcttgcggtgtggggcgctgggcgatggcatcgagaacgcgtgagtgggtggcgatccattcggccgcgtcggggttgatgttgcgggcgacggtgtcgatcgctgttacgtagtgggcaagcctgcgaatctcagcttgttggtcagggtgagcgctgatgaggggctcttgatgggaggcgcggttacggacgtggcggatgagctccacgttttcctcgaagtcgcgtcggctacgccccgggtagtgaggcatacctccgttacgtaagtcagtgagagctttccatacggttgcttccaggcgcggggtgagcagaaagcgccagttgtccagtgacagactcgccacgatctgatcaggggtcgcatcgagccccgcgcgccgcagtcgcgcctcggccctggcgacgttacgcgggaaaccaccgagccgatagctcggggattcccaccaacgccgtatgccagtatcggcgctcaggcgcacgtcaatgaagtttctcaggagtacctcgacatggctgatgtcttccaagaacgctttcgagatgcaggtgttccacacgtaccacgcatcgactggttcgatccggtagcggctgagcctggcgggtgagaaccactcctgcaacgtctcacgactcaccgtgggagcgtggtaagattgatgacgataggcctcgggaaggtcaatgccgcgaaatatcggtatacccccgaggtcattgtcttgcccaggcccctcctcgcatacttgcggggcgtcattggctgccgtcatctcgtctcttcccggtacgtggctgtccatgttcacgggcaggtacggcaatgaggttcccgcacacaaacctctaccaagcatacgctggcaagccgttgcatgagacgacgcctccgcccgccacaccaacggtcaccgccacggccacggtgaccgtgaccgtg

SEQ ID NO: 292 - DNA, 2653 bp, Propionibacterium acnes
  source 1..2653: mol_type = genomic DNA
tggtagcagtaggcattcacccgtgacccacggttaccggaagccccgccgcaatcgataccactgtcagtaccatcaggggcgataggggtcaagctctccttgtcacaatcccttccccggcagcccagtaaccgtcgcttacagccatacatggatatgcgcccattcgtcggcaccgacgccgtgcgggttggcgacgctgacccgtctgctcacaaacgacccttccagcccagcaccacccactacaccgacacgatccacgaagctgaaaccgaacctcccatccccgtccgaaacatcaacgaactcatcaaccccaccaaccatgcatgaacgcacgatcgcctaccggccagccttcctgcgcgacgtgaagcggctcaaaaacaagcactacaacatgaacacacactcaaatgggcggtaaggtcacgaagtcgacgtggctgcctcacggatggcttcggcgagctcttggggtcgactccacatgggccagtggccggttggcagatccatcgcggtgaagttggtcaggtgcgcgacggcgctgaacatcggattgcctgctgcggccagctcgaggacctggacgctgggaatggagcagcagatcaacgtggttagtacatcatggcgagcgctattggacagcgcgacccgtgcccgggccacttgcgcgggttcaggaaccgcccgtgcccggaaccggtcaaggtgctcgttgctgaggccctctaaactggcctgcttgccgagagtatcgaagtcaggaagtggcagctcagctgtttcctcaggtagatctggtgcgaaggcacctccatcgctcatgggaccggagtccacccagacgatccgatggaccaactctgggtgcctgtctacaactaggctcaccggcccgttcgcgccactgtgtcccaccaggaccgcatcgccgcccatctcgtccaggatggctgagatggcgtcagcttggtcgtcgagcgtgcgcgtagtgcgctgggtgtcctccggatcgaggccaggcagcgtcagccccacggctcgactgccagcagtgttcaataactcgactacctcgtcccaagcccaggctccgagccagtaaccaggaacgaggacgataggccgatgctggtcaggtcgcgatgttgaagtcatggagacatagttgcacagtgcgcggacaagggagtggcactatttctggcatgaatttagatctgggtgtccggtgaggcgatcagaacgcctccatgtactgtccgagtgtctacgatgcagcggacacagtcgagcagctggctcacaagtttccaggtgtccttctgcccctatgagggaagtcggctgctctcgcaacctttgagggctgctctggggtcggaaccagttacagatcgttcaagttccgggaactaccgccggtcacgctgattgattcccgggcgatctcgcttctgacgacagtggtcggtaaccgagaggcgtcctactctgaccccgctgctgcggtgagtaaatcacgggcgtcccggatccggccacccgtccaagtgccagccagcttgatcggctaggcatcgtcaaggagcgacggtgaggtgatgatgcgatgtgagcgcaccgcgaagtgaggtataaagaagccttcccgggcgcatgcgtcgcccaggaaggccaggttggcccctggacggctgaatggttgggcggatcaggctgtagcggagacgtgcagtacctcgtaggcgatggcgttggttgggctctggtctgcatcgtggctactgagttcgacgaggatgacggtccaggtggtgatgtcgacggcggtgacgcgggcgatggtggaatcagtggatgctgcaaggaagtcggcggttatgtcttcgatgcagtgggacggagcagtgctggtgggcaggggcacggtcttgacggtcaggcttcgggcagcagagtaatcggcggttccgttaacaagctggtggacggtccagtcctggatcgggtgccggccgaagtcgcgtacgatagccgagtaaccaagttcgccccagcagaactggcgcatcccctctatgtcgcgccagacgtagaagggcgcgtaggagttctggggtgcgcctttgaccttttcttggatgaggtaggccttgaactccagtccatggtagccgtccatgaggtgtccagtctggatgacgcggtcgcggatgatctgcatgtcatagtcggtgggcagggtgatctgatattgcatggcgtacatcagcggttctccttggtttcgtgggagtaggtcgtgggggtgacgggttcctgccaatcgatggttgacaagtcgtcggcggcttgttggtaggtaaggtggatcattggctgtttgagtgcagcgccatgccagtgtctctggccggcgtcgatccagatggattcgcccttggtcaggtgctggggtgcttgtccttcaatatggaccagggcaacgccgcccgtgacgtagaggccctgtcccttggggtgtgtgcctcagcggcaaacgtgacggcgtgggcggcacgcccggcgtcttccgtggcacgatcggccggatccatggcggcgcgcagctgctgttctgcagccaggcgtccag

SEQ ID NO: 293 - DNA, 1468 bp, Propionibacterium acnes
  source 1..1468: mol_type = genomic DNA
cgtccagatcatggctggcggcgtcgatgagggcggtggtggcttcggcgcagcatcgcctgatccactccgaacgtgacaggccagctgtctcggcggcactgtcaatgcgcgccaggagagatttcatgggcgctcatctgtagcctccagataggcgttgatgtagcgcagagcctgatccgtcatgtcgatggcggctgcctcggcagacgacacaacgggctgtggatgataagaccacccaacatagacggcgaacatcaatttctcgacagctttcatgaggtccccggcggcaaccgcatccgcctcatcatccgaggagaaccacttcaggtctgaacggctgtacatagcccctaggtcctgatgtgggtcgaggtccttggaatgatggaagttcctacacacccatcgccaaagacctcaacatggacaacgctaccttcaccactccctcatctgtgaagagccagtttatgcacggtgttgaaagaggcgtcggtctacgacgaatgcgggttaatggtcttgtggtgtggggcgctgggcgatggcatcgagaacgcgtgagtgggtggcgatccattcggccgcgtcggggttgatgttgcgggcgacggtgtcgatcgctgttacgtagtgggcaagcctgcgaatctcagcttgttggtcagggtgatcgctgatgaggggctcttgatgggaggcgcggttacggacgtggcggatgagctccacgttttcctcgaagtcgcgtcggctacgccccgggtagtgaggcatacctccgttacgtaagtcagtgagagctttccatacggttgcttccaggcgcggggtgagcagaaagcgccagttgtccagtgacagactcgccacgatctgatcaggggtcgcatcgagcctcgcgcgccgcagtcgcttctcggccctggcgacgttacgcgggaaaccaccgagccgatagctcggggattcccagcaacgccgtatgccagtatcggcgctcaggcgcacgtcaatgaagtttctcaggagtacctcgacatggctgatgtcttccaagaacgctttcgagatgcgggtgttccacacgtaccacgcatcgactggttcgatccggtagcggctgagcctggcgggtgagaaccactcctgcaacgtctcacgactcaccgtgggagcgtggtaggattgatgacgataggcctcgggaaggtcaatgccgcgaaatatcggtatacccccgaggtcattgttttgcccaggcccctcctcgcatacttgcggggcgtcattggctgccgtcatctcgtctcttcccggtacgtggctgtccatgttcacgggcaggtacggcaatgaggttcccgcacacaaacctctaccaagcatacgctggcaagccccgacgagacgacgcctccgcccgccacaccaacggtcaccgccacggccacgg

SEQ ID NO: 294 - DNA, 2704 bp, Propionibacterium acnes
  source 1..2704: mol_type = genomic DNA
gggatgaggatgacggccgcgccgacacttcggagcgaggtcatgtgacgatccttcggtagctcgacgggttgccgtagatcttttccacgttgatgccactatgtgggttgtcggcgctaaccatttggcctccaccgatgtagacggccacgtggtgggcagggcttccccagaggatgaggtcgccgactttgagctggtcacgggccacggcagtgccgactttctgctggtcggcggcggtgcggggaaggctaatgccgatacgccggtacagcgccgaggtcaggcctgagcagtcgtagccgccatcggctttgccgttgccaccccacacgtaggcgtaggagttgttgtcggcgatcgatttggcccatgccacggcttcggccaggttcttcgacacaccggtctcgttagcggccccggtggcacagttgtttgacaggtgccctgtagtagtggatcccactatttgtttggccatggtttcccatttggcgtaggcatcgggcagggctgagccttgcactgcctgagctgcctgcgtcagcggcatcttctgccagtcagcgatgtcgactaaaccgggaatgtggaatccagggccgccggccgatccggggccagcgtaggtgatggtgtggcctttcaagaacgcctcggtggcgtaggcatcattgttgacctgatccagagtcccgtaccagcccggcaggatgcgctgctgaaaggggccggcgtcaccgtcaccgttagccttcgctgaggtagggtcggccccaagatctgattcttgtttggcggtcatgatagcgatgaccgctgcctgggtaggcagtttgtcacgctggaccacagtgacgatggtggtcacgagctgcttctgcctggccgtgaggcctccggcacccacagtgcctccggtgacggtccccacgcaagcatccccgccgacactgccaccgccgccgccagagttgtcgtcgagggccccagagcctactgacagcagcggcacaatgatcacggtcgctggcaagaccgccaggcccgccagcatcagcactgctgcactcaccacggcgatcacgtgagatgctttcaacgctgcccacctctcgctggtttgagggggcgacgcctgctggtacgcacaggcttggttgatccagtccgccgttggttggcaggcctgggtttgatcggcttgctgggacccggtttgggctccggagtcttaggctccggcttcacatgcctaggcacttcggctgcggtgggaggagtcagcacgtggcgtactggcttggtgaccttctgggcacccgaaacaaccggcttagacaccaccttggcacctttgaccaccggtgcggctgccttcgcgccggccttcttgactgcacgatgcgctttgatagccccggcctcggcccggccaaccctgctagcagtagcatcgagggctctgtggcccgtcgttgccctcaccggtgcatccttgccctggcgggtctgcttcgcgatcgccgacatgccgcctcgcaatgccgaaacatgattgtgggcgtgggcgatcgccgacatgccggccgtcgcgatttttgactggccctgcggggcccctgccccagcacgaatctgccggtaagccgccgacgtgccacgagcacccgccgccattcgcgccaccttcgcagccctagtcactcccgtcgacacgccacccgtggctaccgcagcagcacccgagaccacagtcgaggccatccgccttcgacccgatccggtgagcttgcgaccaccgctgcgcaccatccggcgagcaccccgcccagcccactggccgatcaccgagcccctttcggaacgcttgctgcgcatccaatcgttgatcttgtccctcagccccttctcgcccttgtgacgacgccacatggacatcaagaacccgataatccccacgagctcgagcatgttgacaaccatgaccttgatggcgacatcaccgtcagaggcgaaaaccgacttgatgatgagcatgaccacacccaacatcaccatcgacccgacaatgccgatcatcgagtacaagatcgaacacagatcccggatgagcggatctgtgcggccagggatagcccgcaacacgttgagcatcgacatgaacgccgaccacaccaacttgcacacgtagaaccagcacatgcccgcgaacaccagcaggaccacagccaaacccgccaccgtcgacgagtaaaagaagaaacccaccaaccacgaaccatccgcaatatcgccggcgtaatccgacaacccctcatcacagtcaccaaggtcgtcgcgagcatccgagacgtcatcgtaagggccacccttgagcacctcgatgtacttgtcgtggcacttcgcatcaataatccggccatagttgagctgctgatgaaccggcgccacgaacgagtccacaatgatcgccgacagcttcggatccttcgagtctcccgtcgaggtcatgtcatcaggaatctcgacctcaccagcggtcgccgtcgcaggatcaaccgaactggtaatcatccgagacagcgccacaccgaactgctgggtgcgagccagcggagtagccaatgtcgtcgtatcgcctgcgaacttcgccaccggggccgccaagaaacccaacgccagcgccgcagca

SEQ ID NO: 295 - DNA, 2471 bp, Propionibacterium acnes
  source 1..2471: mol_type = genomic DNA
aggcagggtcgtcgggttcctcgactaccggaggtggggtagggctgagctgttcggtgtcgtcggccaggtcggctcccaggatgcgttcccattcggggctggttttcttgcccgctgaggccatcgtctcgtcgatctgttcgtcagtgggccacacaaatttctttttggtccaggtcgtggtgtcgggtcgcagctgatccagcagttccaggtcttgcggggagtgggccttgcgggggtcgggggtgtagaagaattggacttccttgggggctgattcgccggataggtaggtgcctcggccgcgtttaccgaacgggatgcccacgccgacgtgttcggagccgaacatcatgcgggctccgtcagcagacaggggtccggtggcggcacgcccggagaagttgtctcggatttcgccgcccaggaactcggcgtcggggcgttgggtccccagatcgacgtggatacggcaggcggctgccatgcgcagcagggagccgatccagccgaaaacggggcattctccgggcatcccagagaccttgatcgttgaccaccagtttttcgcgttgccgtagaactggcggtactcgtcgatgaggaccagcacgcgggtgaagtcggtctcgcgggccccttcttcttcgatgcggcggtagcggtcctccatgagagaccacagccagtggatgagggcgacctggtcggggacggtagtggcgaccatctcgatgttgggccactcccgcaggcccaggtactcgatgcgtttagggtcgatgacgaagacgcgccagttgcggcgggcaccctcgacggcgtcgccgatcatggacaccgtttttccggtacgggtgcggccggccttgagctggtgggccatgacaccggagatgtcccagaaacaggtgttgccgtcctcgtcgacggcctgggggattttctcccagtctggggagtctgggccgggaagggccacgggtcggggcaccatcgagggcagggggtggcggcgggtgacggtgatggtgtcgtgttccaggtcgaagtcgctgcgccactggccgagcatcatcgccgaggtcaccgcggccaggcgcaattggatgttcgggctggacaaatgggcgccacgttggtggtgaatggtgaagccgtccaggttcccccgatcggttttccaggaatcgacggtgaccgccgacccatagatctgagtggctacttctttagcccgttccttgtctcggtccagatcggttttgtcagggtcaggggtcggggcgcggtattgcaggacgaaccggccggccgggatcgttgcggatgtcaccgtgaactctgccggcgaccaggcagccgcggccgcctgggtgagggccattggcatggtctcgacggcagcctcctcgggggggatggtgagggtcaggcgtcgcggatgcgtcttcttgcgattccatgtgactttctgcctcaccggcaccttcgccgccgactgaatggctaggcgagctgattcggcagtttcggtacgccggccagcgcgtagcgcccgtcgtgcgtgaaggctgcccaccacagcacagcccatacacggcagccaccagcgcggatcagcggctgctgcatagcccccggtagctagtaccgcacctgaccagccggccgcgatacttttccacgccggtttcgcgccaccaggaccagcgttatggacggtctgcttcgaggctgcggagggacgagacagcggagtgctggtcatgccgcggcctccttgtggcaggtcatttcacaggcatgccggccagcgatgatgccgtggcgcaccgccccggtagccgcatagaccgcgcacaactcaaacacggggcacccatcgcaggccgccgggttcatgctttctttgtcccacgatggtgggtcatcggtgcacggcacggccaggccatcctgttgagcggcgctgatagcggtgaataggcgcagctgggcgcgaacttggtctggggtcaggttgacggtgcgggctacacgcatggggttccttcctcttcaccagtgaaggttccctagacccggccgatgtgcggagagatttcagtgttttatcgaggtgaccagccatccggtctgcgctgcgggttcaggtaccagggtcagatgcagcatggtgtggtcggctaggggcacggcgaccaggggcccgtcggcgctcgccccggtgagggtgggagttccggccacggtggtggcaggaatctggttgggtttcgcggccatcagggagcccatgagggtcggtgcggcgatctggacgagggcgactttgcgggcggcgggatcgcgggtcaaccagccgcgggtgaaagcgagcgccgccgacgtgatatcggggctcagcggggctggagtggcggctgggtgggccgttgaggagggccacacgcgcggtagcg

SEQ ID NO: 296 - DNA, 2537 bp, Propionibacterium acnes
  source 1..2537: mol_type = genomic DNA
ttggtattggtaggcgatggtgtcaccggttttgttgcggatgacgtcgaagccttcgatgtcggaggggatgtcgtcggcgtcgtagacgacggtggtggtgacggggttggaggccgacatttggccgatggtcacgcgcagcatgtttttcaacgcggaggtgaggattgtcgtggcggtggggttcttgtctgcccagcgtttctcggcgatgtcgatcatgtcttggatggttttgacccatcctcggatgggatcgactttggtcagtttgatccctccaaggaactcgatgggcttagtaacgggcccgtcaggaccgaattcggtgtcccagccttcgtcgatggctagtttcagttcggcggcgtcaacccatgtttcgtgggtggtgccgggcacgttgggccaaaaccatcctgctcgtcctttggtgcgtttgaccggtagtaggccgatgtcgtcccaccaggatggcacggtgaagcggatgtggtagcgggccgggtgccaggggttgttggtgaacaggtcgtgagcttcggtggcgctgagcagagtggcgggtgcggcaccgatctctccggtcactgatccggcatacatgaatcggccgtcgatgtacacgaagttagggatagggccggcaggcacggtggggcgccaaccttgttcgcggtcctcggggttgccgtcgtcgacgcatagttcgtagcggtgctgaggggaggtgtgttggatgagtgcgcccagttcggggtccatcggctccatgcgataggactcgggggtccgtagcttccagaggttgattccttctgctccggggcggtccatgagggcccagtcgcggtcgattctggtggcgatgatgtgggttaattcgcgccatgcccagcgggcctggattggggtgagggtctggccagggaaccattcatcagcgaccagaatgtcgaggttgcggtcggtttctttgtgggtgaaccggcctcgggcgggccgcccggacagcatgaacaggccccgcacgtgccagtcctggttgaactcgcgggtgtgagcgggggtgtcaggcagcagccaggattgaggctggtcggggatgttaccgcagacgatcaggcgtcgggcgttgtggtgtagcgcggttgttagcaggtctgacagggtcgcgtgcttggtgcgccgcccccctagcactggcaggatctcgtttccggccgcgtcgactccccgggcggtgtcgatgtctagccacactgtttcggggtcggggggccgatgtggggcgggacggcgctgctcctggtcgtctctcatggtttcctcctttgggccagggagcggccggcgtcgagggcgttcatgcgctcgcgttgttcttcgcgtagttggtagacccggcctcgtgacactcctgctgcctcggcgatggtggtggccggcaggtggccgatggcggcagcgtcggcaaggacgtcacgccaggccaggtcaatggttcccagctgggctagagcttcgtcgcggcggcgggtggcatcagccactacggaggcccaccctgtggggtggatggtcttgacgacgattcggttgtggcggatggggccccatgcatcagcggggacttgccagccgtgattggcggcggactcggtgatcttgaggcgtcgctcaggtgcgcgggtgcgggcagtgacgtcggtgttccaggtctggactggtacccacgtcccctctcggatgcgttcgatgacgcacgtggtgacctcgtcggtgactgtgatgaccagacgataatctttcccgtctggggtggttcggtagctgggcatgtcaccctcccctatctgtcaaatgagctagacacagtgtctatttaatttgacgcaaagtcaagtgcattagacgcctttgtgtggatccgccccaccagacaaacactcgcgcctcatgacccgccgcgaagccttaacgaaaccaaaccgcttatagaaccgctccgcagcgctccccgagggctttagctccaaggtaagaccttgctcgtcggcccattggcagacttgtgtgaggatctgtgagccgtagccctgatttcggggggcggcatgcacgcacatcagcatgtgaccatgacggcgggtcggcgggctgacataagccccaccacgccagtccggtgtgatctgccaacttcgccatgccgcagcgcgccagcggcgggcctcggtagccaccatgatcaccgcgacgacgacgagcgttgcggccccgatcatggccagctcactccagccaggccagttcccggagatgatccagcctcccagcgcccagatgatcatggcttccacgcccgccgcaatcgggacgagtggggcagtacggatgcggcctgccatgatttcggtgatctcgctgcgatgccacgaccaagagaactcccacgaggcacgaattaggctcatgcgtgaacggcttcctcggcttcgctttgccatagcttctctagacggcgctcggct

SEQ ID NO: 297 - DNA, 2332 bp, Propionibacterium acnes
  source 1..2332: mol_type = genomic DNA
ggcggcgcaccaggtgcgccgccttcccccgtgctggtgtctcgtcggcttactggtgggggtcgtaggggaacccgtaggtgtgttccagggccttgcggagaaggtcgttcatagttgtgtgttcggcgacggccttcatcttcagcgccgtgtgggtggcggtgggtagcttgacgttgaacgcggtgatcggggtcttggccgactggaaggtttcagagacactggctccctggctggccgccatttggtcggcgtaacggctggctttgtcggcggcggtgggtttgcggttcttactcacttcagcatctccttgattcggtcggcaacctgggcgaactctcctagatctgttggccgggttccgatggcttgccgataggcgacccgtcgatgaacctccgcatcgagaacgtctaggccctcaacggcggcggccccctcgtgggcatcacggtattgcctggtccaatcggctttgttgaagagcagggcccggcgtgtgccgtgggccacctggtaggtcattagcgctcggtccatgtccaggtcccccgactcggtcgggatgatgaccacatcggcgatgtcgagggctgcggtgatcgtctgagagtcaccggggggagtgtcgatgatgacaaggtcggcgtcgatgtcacggcagcgcctgacgataggggcattagccgggcggacctcgaagcccagcgggtcaccagtctcgaaagcgtcggtagcccatgacgtcgccgatccttgcgggtcggcgtcaagcaagatgactcggtactgagctgctaaggccgttgccaggtagaccgccgtggtcgttttcccgaccccgcccttggtgttgacaatagaaatactacgcataaatacatcattacacatgtgcatcgatgtatctgtatatatgtgtatcggcgtgttgtgagggaaaacccgggccacatacaacgatcccccagccaccacagccgggggatctctcagtaaagccagcaactcccacagaagttgcacccccacgatacccaccacatccgtgtcaagcccccacaacacccaccagcgccctaggcttcccccatgaacattgacatggacacaccaaccgaaaccgaagccgacaccttcgatgccgtcctcgccgacattaaccacatcaaccgcctcaccgccgacgaaatcgagtgctactccatgggagcctgtctcctcctcctcaaccaccaccccttctccgaactccgccaacactgggccgacaaccccaccgacgaaaccacgtggaccctctacggggccatcatcgccgcctccaccctggacccccacctcagcatcgacgccctagcccgcctctaccagctccccctcgacctcgtgacccaagccctcaccgtctaagcgtcgatgagcgggggagaggtagcgcactatcggctaaggaaccccacaaacaccaaacccttgtcactgggaagggtttggtgttatgctggtctcacaactcaacagaggaggtgagacatgggaaatgagtaccagaagtcgctcaaagtcctgttcaagaaactggaatctgagcaaggagcccgcatcgagacccggcgcaaaggatggatgatctacccgccggatacgtcacgatcagcggtcatgatccacaagactccatcagatcgcagagcatgggccaacatgctttccgaactgagacgctcaggattcaccgtctaactcagtgaagggggctggagctccagccccctttcaaccacctcccccggacaccacacaagaaaaggagaacatgatgtggcacgttcggttgtcgcttcgcgcaatcagcgaggacatgctgttcgacgccctggacaccctcgaccccttatccccggtggccacactgggccccgatgagcacaccggatcattggcggtgttcgtcgaggctgactcactgacagacgccatcgagactgcccgcacagccatcaccaacgcatgcaacaccgccaccataaccggcgtagaagcccgccccgaagacgaatgcttcgcagacgttgaccggcccctgttcccgccagtggtcggatacaccgaaatcgctgaaaccgcaggactctcacgtcagcgcatccgccagctcgcaggcaccgccgggttccccgcacctgtcatcaagaccgcggccggcccgctgtttcccaaagccgccgccgagcagtgggcgcggacacgccagcctaaggcaggccgcccaaaactccagaccaccacctcataacacatcccgtgtgctgaacctgtt

SEQ ID NO: 298 - DNA, 522 bp, Propionibacterium acnes
  source 1..522: mol_type = genomic DNA
cgacgccgcggcggggtaacctcctcgccccgctccaactgtgttaacgcctcgaccaggttggtgcccggtttcagcccttttagcacgaaccgcaccaggcgggggtctcggccgattcgtcgggcaatctcggcttggctccacccttcggctaacagggtgcgcaacaagtcttgggcccggttatcacgctcagtcactggtcgcctcctcggggagtcctgcctgctcggcctgctctgatagagcagcccgttccgatccggtctggggcgcttccaaagggcccggcaagacacctttgacacgcagccgcccgtccttgccgtcatcgccgcccccctgggccacagggagcgcccaggggggcacgttgctggtgtagatggcgtcgccgtggatggccagcagggtgcgggagttcatgcgtagtgctcctcccttggttgtggcgttttttccggtggtggggtcggcgatgggtgtgttgagggtgcgtacgcgggacagggcccagat

SEQ ID NO: 299 - DNA, 522 bp, Propionibacterium acnes; identical to SEQ ID NO: 298
  source 1..522: mol_type = genomic DNA

SEQ ID NO: 300 - DNA, 2317 bp, Propionibacterium acnes
  source 1..2317: mol_type = genomic DNA
aggtcgggatgatgggtgctgttgctgatgcggccctcgctgctggcggcgctgtgatcggagtgatgccgcagcacttggtggacggggagatcgcccatcctagtctgactcacctcgaggtagtgcggactatgcatgagcgcaagcagcggatgagtgacctagctgacgcgttcgtcgcgctacccggcggcggcggaacccttgacgagctattcgaagcatggacatggcagcagctcggtgtacacagcaaacccgtggccttgtacgactcgaccttctgggcaccgctgaccgcgctactcaaccacatgaccatcgaaggcttcatccgccctgaggaccgcgcctcgctcgtgatcgccgataccatacatcagctgatggccgatcttgagggatggaccccaccaccaccgaagtggcgctcgtgacatagaacaaatgattctgactatggctcattgacatctgcgcagcggctactagctccattgacttcaaatcgggccttggccgaggctcggttcaggtggcccggaatggatccccacaaattgaatgctcatgatcgaggtgatgaacgcccactctattgtcctacgcccggttgtatccagcgagcaattgaaggtgctgcgcctgttggtcgaccaggccgagccactcatcatcgacgggcgcatcttgtacgaggcatgggacaggctgcaaacagcccgtccggcccgctagaaaaaatttttagggcccgctccgcacatcccggtctgtacccacaccttcaagggtgtgaagggaataaaaacacacctaacaacaactttgtttcatgatttggcgcgtcggaccctttctgaccgatgtcgtgcgcaacaatggacccatgagttcgcctaccaagatgcgccggaaggggacacgcggcccgaaacctcgcagcgacgaggagctaacggctgtgatgttccgcgtcccagagtcagtggccgaacgtgtcagcgatatggcttgggagctgaggctctcccgatccgatcttgtgggctggtcggccctctatgcactcaactcgatgctcagacagcgcggagaggacacgattccggttccggagtatctggacaaggccgtgctcgctgcgttgtatcccgatgggttgcccttcgacgaggacaccgaggagccgggcgagaatgccgggcaggaggagcttgcgatgactggatgagcccgaacatggttgaaggccgccccgccaggcgaccttcaatcaatggtttcggttgtcagctgcagccacccttgccaggtgctgtggttcttctccagaggaggagggaccgccatgaagacccagaagacctagaagatccaaaagaaccggtttcggctgttgcttcggtcttcatggtagctgatagcccgcgtcgttggaagtgcgacgacgccgatcctcatcggtatcgcaccctgttccagggtcgagaatgtgaaggattaacaaccatgacaagtcatgagacgccctcccggagggcgtcatgaccgctttaattcaagctctgccgacagctgaactgtctgctggacctggtgctagcagtccagctagaccctctgctgagggcttcatcaagattcaccacgacctcattagtgcgggcgtgtcgggtaacgcgatggcgttgttcgtcgcgttacgtaaccagcccggctgtgatcagtggacccgtcactcgtacctgcggctagcccaatggtgcggctgggatgggctgtcggaggcggcgggctgtaagcgggtgcagcgggccgctgctgagctcgctagcggtggttggctggaatcgcgggtcggccatgatcgtcgcaccgctaagacgctggtgtggcatcggttgaccagccccgacaccgaccgctgggagcaattgccgcggattgtgtgggcgaggatctgccagatcgccggggagacgtcgggagagtgggtgaggcattggctggtgtggcggatgctggccggtcgtactggtgtggctcaggcccctacgtccatcgtggcccggttcctgggctgttcttcgcgccaggtctctcatatccgtggggctctcgttgatgccggtctgctcggctgtgacgaggtctcgggggcggcgagccgggtgtggttcccctcgatggccgaggagtgtgcagcggatcgtgaggtggtcgatggggccgtcgtcgatgctgaggtgggctctggtgaaggtgtcgaggagggcggggaacccctgtcgattttgtccacccacccctg

SEQ ID NO: 301 - DNA, 2290 bp, Propionibacterium acnes
  source 1..2290: mol_type = genomic DNA
cccccaccagccagcctggccgtcaacggatcaacgtcaccgtctacgttgtgcccgaactccatgagcggctgcgctcccgatcggcggcgacgggggtgacggtctcggatctggtggtgcatgcgttagcgttcgtcgccgatcatgcgggggaggcgatcgccgatgatctgcgcgtcgagacgggccccggcatgggggccggactgttcgatgtgaccccatcgcggccagtaggggtcgccaaaacccagctgggggtgcgaatgacccgccacaacaaggatggcttggaccagctgacccggacgagtggggcccgtgaccgcagccatcttgtgtctgtcgccgtgcgcgactatctcgactccaaccctgtaaagaaaggccgacatgtccgctgatgaaactcctgccgcccggggtgggcgacgctttgatacgaccgtcaagcccaggcgccgtcccatgcttatcgccgccggtatcgccatcgtgatagtcggcgcgctcctcatcactcagttgattcgctccgcccaaaccgagcatcgcgtgctggaagtccacgccgatgtggctcgcggcgaggtcatccgtgacaccgatctggtatcggtgactgtcggccaggtcgacaacgtatcaacggttcccgcagaccagctcgactcactggtcggcaaacgcgccacggcagatcttcgagccggatcactcttgcctgctggggctatcggcccggccgatgtcgttccagctccgggcaagtcgctggtcgggctgaagctagccgccggacagatccctatcggagaccttgctgccgggacgaagctgcgcctgatccagacgtcggcacccagcggctcatccaccaccactgatagcagcaccaataccgatggccagtcgtgggaggcaacaatggcgaccggcaccaaaaagaccgagcaggtcaccttgatcaacgccgaagtgaactcgcgtgatgccgcccggatcgcccaactgacgtcacagggccgtatcgccgtagtgaaggatccgatccgatgagcaccattgttttgaccagcgtctcgggagccccaggggtcaccacgacagcgatcgggctgggcagggtctggccacaatcgagcctggtcgtcgaggatgacacccaccacgccatgctggcgggctacctgcgagcctcccagcacgccgaaccgaacctggccgcagtggcgaacctgacgtcgactccaaccaacgcccaaacggtgtgggaatctatcgccagacccctacccaccgatgacccagtcggcgggctgcgacgcaaaggcatcctcggcccgcccacgccgtggtctcgcgcaggcatcgacccccgatggggattcatgctggccctgtggcggcaactggaggaggctggcatcgacaccatcatcgatttgggtcgcctagccacaccactgacctcaacgccacacctgatcgccgcacccatcgtcgaggacgccgacatgatcttggtgatgatcgaggcgacactacgcgacatcgccggcgcccgcacgatggtggagggactcgctgagcagatgaacttggccggcgcctaccgacgtctcggactgcttgtccaccgtggcggccaggcccgcggcgtcgccgagttcaatgacaaggagatcacctcggcgttacgactcccggtcatcggggccattacccatgacccggccggagccgcccaactctccgacggggtcgggcagcggttcgacaagtcacgtctggcccactcactatcaaaggtggcggccagcctcgtcgatgccataaacaagcgccacgctgatgacgaggaggatctgtgatggccagttttgctgataatccgttcgacaagctgcgctcccaggatgcggcaagagcttcggtagagcaggagcctgatgccggattagcgtcggagttgttttcgacgtcgtcggggtgggccagctctcagcaggtgtcccaagctcaaccggtgatgacccgttcggagaacgtggattggccggttgtcgcggagctagccagtacggccactgatgaggttgaggctgagatcagccggtggagttccactcatgatggggtggcgacgctagacattcgccaggccatcgcggagcctgctattgcctcggcggtgtctacgtatgctgaccgacgccagatcgatgtaggggagacctggcctgatctggtacgccagcgataccgcaaggctgtgtgggatcag

SEQ ID NO: 302 - DNA, 2310 bp, Propionibacterium acnes
  source 1..2310: mol_type = genomic DNA
ctgtgggagacgatcatcacgtacccgttagatcgtcgccctgacaagatcgctgcgaacctcatcctcgacacgttgcaccgggttacccggttttggcgtgctgattcccccgatgaggaagaggctcacggtctggtgcccttccctgacactctcatcgccccagagcccgatgaggacgtcacagctagccaggccatcgccttggcggtggaccgcaactggattaccgaggacctagcccgcctcatgagccatatttactgtgacggtatgactggagctgatgcgggtcgtctgcatggctgcgctccagctacggtgcgatctcgatgccgtgatggtcgggccgtgttgcagcgcaacgccgagacgatcctggccgtctgctgatccctctcttgctcatgcctgccgccaccctacccctacctgctagaaacatagccatgtctccagcaacgcatctagcatatcttctagcaattgatctagctaccatatagctgatgatctagctatcatatagctgtgtctccagcccaaaggacagcccaatggcatgcttgccacaggaaggtgcgtcagcctcccgaaatactggaaggagctttaccgtgcaggacatgacctcgaccagaccgattgaccgatccccgttcgaccgcactattgcggtgtggaaccacaaaggcggcacgttcaagacgtccgtcgtggcgaacctgggatacctgttcgccgccggtggcaacaaggtgttgatggtcgacatggacccccaggccaatctcgacattgacttcggtatacccgcgggagaacgtgaacggggcatgggattagccgaggcgctacgtgaggggacggcccttcccccaccgcagcatctcagcgaaaaccttcacctggtcagtggcggcccggccctccacgagttcaccgaccccgcatccttagcggccatcctcgaccgagtcaccaccgcacgctacgacctgctagctcaggcccttgccccgctggcctgggactatgacctcatcttcatcgactccgggccggcccaaactctgctgtcccagaccatccttggagtagcccgctggctggtagtgcccacccgcaccgataacgcctcaatcactggcctcgtcgacgttcaagacgccatcgacggggttgcctcctgcaaccctgaccttcaactactcggcgttgtcctagccggcgtgggggcccgggccacccggatcgccgcagataaacgccacgccatcgacacagtgctgggggcaggaaccgttttcgatgcggtcatccactactccgagaaggtgtccgtgctcgcacgccagcagggcaagaccgtcgccgagctagccaacgactaccacaacacccagcccgcctacacctacctagctaaaggccagaacatccccaacgtcgccaaggcagccgtcagcatcgaaactgattatctgaggctggccaccgagatcagcgaccgcatgttcaccagcgacgagcaggagcctgatcatgactgacgatccgactccatccgagcagaacaaccccaccagcgacgacatgcgcttggccgaagaatgggccaacagcggccgcacagtgggagccctgccgcgccgtcaacggcctcagcgacccacaccccgcaccaccagccaaccccctgtctcgtcccctgacacaccggctccgaaaaaaccccagaagacccccaccagccagcctggccgtcaacggatcaacgtcaccgtctacgttgtgcccgaactccatgagcggctgcgctcccgatcggcggcgacgggggtgacggtctcggatctggtggtgcatgcgttagcgttcgtcgccgatcatgcgggggaggcgatcgccgatgatctgcgcgtcgagacgggccccggcatgggggccggactgttcgatgtgaccccatcgcggccagtaggggtcgccaaaacccagctgggggtgcgaatgacccgccacaacaaggatggtttggaccagctgacccggacgagtggagcccgtgaccgcagccatcttgtgtctgtcgccgtgcgcgactatctcgactccaaccctgtaaagaaaggccgacatgtccgctgatgaaactcctgccgcccggggtgggcgacgctttgatacgaccgtcaagcccaggcgccgtcccatgcttatcgccgccggtatcgccatcgtgatagtcggcgcgctcctcatcactcagttgattcgctccgcccaaaccgagcatcgcgtgct

SEQ ID NO: 303 - DNA, 2632 bp, Propionibacterium acnes
  source 1..2632: mol_type = genomic DNA
ttggtattggtaggcgatggtgtcaccggttttgttgcggatgacgtcgaagccttcgatgtcggaggggatgtcgtcggcgtcgtagacgacggtggtggtgacggggttggaggccgacatttggccgatggtcacgcgcagcatgtttttcaacgcggaggtgaggattgtcgtggcggtggggtttttgtctgcccagcgtttctcggcgatgtcgatcatgtcttggatggttttgacccatcctcggatgggatcgactttggtcagtttgatcccttcgaggaactcgatgggctgggtgatgggcccatctggtccggcttcggtgtcccagccttcgtcgatggctagtttcagttcggcggtatcgacccatgtttcgtgggtggtgccgggcacgttgggccaaaaccatcctgctcgtcctttggtgcgtttgaccggtagtaggccgatgtcgtcccaccaggatggcacggtgaagcggatgtggtagcgggccgggtgccaggggttgttggtgaacaggtcgcgggcttcggtggcgctgagcagagtggcgggtgcggcaccgatctctccggtcactgatccggcatacatgaatcggccgtcgatgtacacgaagttagggatagggccggcaggcacggtggggcgccagcccttttcgcggtcctcggggttgccgtcgtcgacgcatagttcgtagcggtgctgaggggaggtgtgttggatgagtgcgcccagttcggggtccatcggctccatgcgataggactcgggggtccgtagcttccagaggttgattccttctgctccggggcggtccatgagggcccagtcgcggtcgattctggtggcgatgatgtgggttaattcgcgccatgcccagcgggcctggattggggtgagggtctggccagggaaccattcatcagcgaccagaatgtcgaggttgcggtcggtttctttgtgggtgaaccggcctcgggcgggccgcccggacagcatgaacaggccccgcacgtgccagtcctggttgaactcgcgggtgtgagcgggggtgtcaggcagcagccaggattgaggctggtcggggatgttaccgcagacgatcaggcgtcgggcgttgtggtgtagcgcggttgttagcaggtctgacagggtcgcgtgcttggtgcgtcgtccccccagcactggcaggatctcgtttccggccgcgtcgactccccgggcggtgtcgatgtctagccacactgtttcggggtcggggggccgatgtggggcgggacggcgctgctcctggtcgtctctcatggtttcctcctttgggccagggagcggccggcgtcgagggcgttcatgcgctcgcgttgttcttcgcgtagttggtagacccggcctcgtgacactcctgctgcctcggcgatggtggtggccggcaggtggccgatggcggcagcgtcggcaaggacgtcacgccaggccaggtcaatggttcccagctgggctagagcttcgtcgcggcggcgggtggcatcagccactacggaggcccaccctgtggggtggatggtcttgacgacgattcggttgtggcggatggggccccatgcatcagcggggacttgccagccgtgattggcggcggactcggtgatcttgaggcgtcgctcaggtgcgcgggtgcgggcagtgacgtcggtgttccaggtctggactggtacccacgtcccctctcggatgcgttcgatgacgcacgtggtgacctcgtcggtgactgtgatgaccagacgataatctttcccgtctggagtggttcgatagctgggcatgtcaccctccccccatatgtcaatctaactagacatattttctagcccatctgacacattgtcaaggacaatagacctttcgtgtgaatccaccccgtcaaatgcacactcacgcctcatggcccgccgtgacgccttaacgaaaccaaaccgcttatagaaccgctccgcagcgggcccggagggcttcagttcgagggtgagaccgtgctcgtcggcccattggcagacttgtgtgaggatctgtgagccgtggccttgagtgtgggggacggcgtggacgcacatgagcatggggccgtggcggcgcgctggcggggccacgtaggctccgccatgccagtccggtgtggtctgccaacttcgccatgccgcagcgcgccaacggcgggcctcggtagccaccatgatcaccatgatgatggacagggttacgacgccgactatggccagctcaccctgaccaggccagttcccgcagatgatccagcctcccagcgcccagatgatcatggcttccacgcccgccgcaatcgggacgagtggggcagtacggatgcggcctgccatgatctcggtgatctcgctgcgatgccatgacaaggagaattcccacgactcttgaatcatgctgatgtgtgaacggcttcctcggcctcgctttgccatagcttctctagacggcgctcggctagctcgtcggggcacggcgacagcctgccgcactcggagcagaccccgaagtggcgcgagagagtgatgaccggctcgtcgggagcatgaaccga

SEQ ID NO: 304 - DNA, 2061 bp, Propionibacterium acnes; identical to SEQ ID NO: 205
  source 1..2061: mol_type = genomic DNA

SEQ ID NO: 305 - DNA, 2219 bp, Propionibacterium acnes
  source 1..2219: mol_type = genomic DNA
gctgagaaaaattttgggtccgccctgcatatcggggcctcttcataccttcaaaagtgtgaagggaatacagactcttcgactggaattaaaatggtatatggcgtgtccggtccgcacccagctccacgatgcgccatagaggagccataacttcaccaatcgtatacgatatgagtgtaggtgagcatctaccggtggccgacagtcagatacaagcatgggcggatgaagcagaagctgattatgacctcagcatgcttccgccgtctcgacgtggtcgcccaccggtggggaggggcccgggcactgtggtccctgtgcgcttcgacgcggacactctcaaggcgttgtcacaacgagcccctgacgaaggattgaccacgcgttctgacgcgatccgtgctgcggttaaccagtggctcggcctcggctcgtaaacattatcggcgcgacaaccttactgatgacgctgttggttacgccgtagagcacatcttgtactcgtgggcgctcgacgatgccgatgatcctcgttgctggatgatgattcggtgttgacccagctggcctcctcatggagctagttatcctcatctacgacgatggctatgaactcctgatccacgccatgaaagcccgccctcagtatctgagctacttcgctatctagtgttgttgggcgagttgaactcaacttttctccgacgcaagcgccaataaaaggctgatccatccgaataccaccaaacacggctgaagtgtggaacagattcagcaagacagggtgcggtgctcgggtgcgttggggagatgaggatattcaggcttctggcgggatgtggcttgatgacgtccaggatcaccggttcggttttgaaggtgccttgcattaatgtcgacagggtcgtacgactcgaggactggatcgaccagcccgttgcgtctgaagaacttcatccaccccggtggagctccggccgcgtactggtgcaacggatcattagcatgggtagcgtgagtatgccttcgatcgtggtcagtgctgtcatcatccaagattctgacgggcggcttctcactgtccgtaaacgaggcgccgaggcattcatgctgccaggcggcaagccggagcccggcgaggactcgcgtcaggcagtagtccgggaagtgcacgaagagctcggcgtcgcattgtcttccgacgacctgcgtcgggtgggagtgttcaccacgcgagcagcgaatgaggccggccatcaggtggtggcgacgattttcacccacaccccggttgcggtgagtgagccagctgctgagatcgagcagattcgttggctcgattggagtgtcgacgccctgcctgatgacctggccccgctgctggtcgaggcagtcatcccgtggctgcggcgccgtatccggtcggtcgctgtattcacgggtgcgaaggatggaaccgaccctcattatcgtgtcgaagcaaccgccttgggccggggtctcgcacacgccgggatcaccctggtttatggcggcgggaaggtcgggatgatgggtgctgttgctgatgcggccctcgctgctggcggcgctgtgatcggagtgatgccgcagcacttggtggacggggagatcgcccatcctagtctgactcacctcgaggtagtgcggactatgcatgagcgcaagcagcggatgagtgacctagctgacgcgttcgtcgcgctacccggcggcggcggaacccttgacgagctattcgaagcatggacatggcagcagctcggtgtacacagcaaacccgtggccttgtacgactcgaccttctgggcaccgctgaccgcgctactcaaccacatgaccatcgaaggcttcatccgccctgaggaccgcgcctcgctcgtgatcgccgataccatacatcagctgatggccgatcttgagggatggaccccaccaccaccgaagtggcgctcgtgacatagaacaaatgattctgactatggctcattgacatctgcgcagcggctactagctccattgacttcaaatcgggccttggccgaggctcggttcaggtggcccggaatggatccccacaaattgaatgctcatgatcgaggtgatgaacgcccactctattgtcctacgcccggttgtatccagcgagcaattgaaggtgctgcgcctgttggtcgaccaggccgagccactca

SEQ ID NO: 306 - DNA, 2218 bp, Propionibacterium acnes
  source 1..2218: mol_type = genomic DNA
caccaaccatgcatgaacgcaagatcgcctaccggccagccttcctgcgcgacgtgaagcggctcaaaaacaagcactacaacatgaacacacactcaaatgggcggtaaggtcacgaagtcgacgtggctgcctcacggatggcttcggcgagctcttggggtcgactccacatgggccagtggccggttggcagatccatcgcggtgaagttggtcaggtgcgcgacggcgctgaacatcggattgcctgctgcggccagctcgaggacctggacgctggggatagaacagcagatcaacgtggttagtacatcatggcgagcgctattggacagcgcgacccgtgcccgggccacttgcgcgggttcaggaaccgcccgtgcccggaaccggtcaaggtgctcgttgctgaggccctctaaactggcctgcttgccgagagtatcgaagtcaggaagtggcagctcagctgtttcctcaggtagatctggtgcgaaggcacctccatcgctcatgggaccggagtccacccagacgatccgatggaccaactctgggtgcctgtctacaactaggctcaccggcccgttcgcgccactgtgtcccaccaggaccgcatcgccgcccatctcgtccaggatggctgagatggcgtcagcttggtcgtcgagcgtgcgcgtagtgcgctgggtgtcctccggatcgaggccaggcagcgtcagccccacggctcgactgccagcagtgttcaataactcgactacctcgtcccaagcccaggctccgagccagtaaccaggaacgaggacgataggccgatgctggtcaggtcgcgatgttgaagtcatggagacatagttgcacagtgcgcggacaagggagtggcactatttctggcatgaatttagatctgggtgtccggtgaggcgatcagaacgcctccatgtactgtccgagtgtctaggatgcagcggacacagtcgagcagctggctcacaagtttccaggtgtccttctgcccctatgagggaagtcggctgctctcgcaacctttgagggctgctctggggtcggaaccagttacagatcgttcaagttccgggaactaccgccggtcacgctgattgattcccgggcgatctcgcttctgacgacagtggtcggtgaccgagaggcgtcctactctgaccccgctgctgcggtgagtaaatcacgggcgtcccggatccggccacccgtccaagtgccagccagcttgatcggctaggcatcgtcaaggagcgacgatgaggtgatgatgcgatgtgagcgcaccgcgaagtgaggtataaagaagccttcccgggcgcatgcgtcgcccaggaaggccaggttggcccctggacggctgaatggttgggcggatcaggctgtagcggagacgtgcagtacctcgtaggcgatggcgttggttgggctctggtctgcatcgtggctactgagttcgacgaggatgacggtccaggtggtgatgtcgacggcggtgacgcgggcgatggtggaatcagtggatgctgcaaggaagtcggcggttatgtcttcgatgcagtgggacggagcagtgctggtgggcaggggcacggtcttgacggtcaggcttcgggcagcagagtaatcggcggttccgttaacaagctggtggacggtccagtcctggatcgggtgccggccgaagtcgcgtacgatagccgagtaaccaagttcgccccagcagaactggcgcatcccctctatgtcgcgccagacgtagaagggcgcgtaggagttctggggtgcgcctttgaccttttcttggatgaggtaggccttgaactccagtccatggtagccgtccatgaggtgtccagtctggatgacgcggtcgcggatgatctgcatgtcatagtcggtgggcagggtgatctgatattgcatggcgtacatcagcggttctccttggtttcgtgggagtaggtcgtggggatgacgggttcctgccaatcgatggttgacaagtcgtcggcggcttgttggtaggtagggtggatcattggctgtttgagtgcagcgccatgccagtgtctctggccggcgtcgatccagatggattcgcccttggtcaggtgctggggtgcttgtccttcaatatggaccagggcaacgccgcccgtgacgtagaggccctgtcccttggggtg

SEQ ID NO: 307 - DNA, 578 bp, Propionibacterium acnes
  source 1..578: mol_type = genomic DNA
ggcgtgggcggcacgcccggcgtcttccgtggcacgatcggccggatccatggcggcgcgcagctgctgttctgcagccaggcgtccaggtcacggcgggcagcatcgacacccagggcagcctcgacggcttcagggctacgacgctggccgggctggttgaccgcagaccactggtgccgggcgtcgtccagatcatggccggcggcgtcgatgagggcggtggtggcttcggcgcagcatcgcctgatccactccgaacgtgacaggccagctgtctcggcggcactgtcaatgcgcgccaggagagatttcatgggcgctcatctgtagcctccagataggcgttgatgtagcgcagagcctgatccgtcatgtcgatggcggctgcctcggcagacgacacaacgggctgtggatgataagaccacccaacatagacggcgaacatcaatttctcgacagctttcatgaggtccccggcggcaaccgcatccgcctcatcatccgaggagaaccacttcaggtctgaacggctgtacatagcccctaggtcctgatgtgggtcgaggtccttg

SEQ ID NO: 308 - DNA, 2201 bp, Propionibacterium acnes
  source 1..2201: mol_type = genomic DNA
tccgccctgcatatcggggcctcttcataccttcaaaagtgtgaagggaatacagactcttcgactggaattaaaatggtatatggcgtgtccggtccgcacccagctccacgatgcgccatagaggagccataacttcaccaatcgtatacgatatgagtgtaggtgagcatctaccggtggccgacagtcagatacaagcatgggcggatgaagcagaagctgattatgacctcagcatgcttccgccgtctcgacgtggtcgcccaccggtggggaggggcccgggcactgtggtccctgtgcgcttcgacgcggacactctcaaggcgttgtcacaacgagcccctgacgaaggattgaccacgcgttctgacgcgatccgtgctgcggttaaccagtggctcggcctcggctcgtaaacattatcggcgcgacaaccttactgatgacgctgttggttacgccgtagagcacatcttgtactcgtgggcgctcgacgatgccgatgatcctcgttgctggatgatgattcggtgttgacccagctggcctcctcatggagctagttatcctcatctacgacgatggctatgaactcctgatccacgccatgaaagcccgccctcagtatctgagctacttcgctatctagtgttgttgggcgagttgaactcaacttttctccgacgcaagcgccaataaaaggctgatccatccgaataccaccaaacacggctgaagtgtggaacagattcagcaagacagggtgcggtgctcgggtgcgttggggagatgaggatattcaggcttctggcgggatgtggcttgatgacgtccaggatcaccggttcggttttgaaggtgccttgcattaatgtcgacagggtcgtacgactcgaggactggatcgaccagcccgttgcgtctgaagaacttcatccaccccggtggagctccggccgcatactggtgcaacggatcattagcatgggtagcgtgagtatgccttcgatcgtggtcagtgctgtcatcatccaagattctgacgggcggcttctcactgtccgtaaacgaggcgccgaggcattcatgctgccaggcggcaagccggagcccggcgaggactcgcgtcaggcagtagtccgggaagtgcacgaagagctcggcgtcgcattgtcttccgacgacctgcgtcgggtgggagtgttcaccacgcgagcagcgaatgaggccggccatcaggtggtggcgacgattttcacccacaccccggttgcggtgagtgagccagctgctgagatcgagcagattcgttggctcgattggagtgtcgacgccctgcctgatgacctggccccgctgctggtcgaggcagtcatcccgtggctgcggcgccgtatccggtcggtcgctgtattcacgggtgcgaaggatggaaccgaccctcattatcgtgtcgaagcaaccgccttgggccggggtctcgcacacgccgggatcaccctggtttatggcggcgggaaggtcgggatgatgggtgctgttgctgatgcggccctcgctgctggcggcgctgtgatcggagtgatgccgcagcacttggtggacggggagatcgcccatcctagtctgactcacctcgaggtagtgcggactatgcatgagcgcaagcagcggatgagtgacctagctgacgcgttcgtcgcgctacccggcggcggcggaacccttgacgagctattcgaagcatggacatggcagcagctcggtgtacacagcaaacccgtggccttgtacgactcgaccttctgggcaccgctgaccgcgctactcaaccacatgaccatcgaaggcttcatccgccctgaggaccgcgcctcgctcgtgatcgccgataccatacatcagctgatggccgatcttgagggatggaccccaccaccaccgaagtggcgctcgtgacatagaacaaatgattctgactatggctcattgacatctgcgcagcggctactagctccattgacttcaaatcgggccttggccgaggctcggttcaggtggcccggaatggatccccacaaattgaatgctcatgatcgaggtgatgaacgcccactctattgtcctacgcccggttgtatccagcgagcaattgaaggtgctgcgcctgttggtcgaccaggccgagccactca

SEQ ID NO: 309 - DNA, 2334 bp, Propionibacterium acnes
  source 1..2334: mol_type = genomic DNA
cccgcggcgtccgctggggcgagtgcgtgtctgtcatctcatcttttatcgtcatgtttccccttgtcagaggggtctttgcaaagtgacaacgtcaggggtcttgacgacaacatcctcgacaacatcgtggcggtggtctgtgtcttgtcagttcaacgcaccggggaaagaggcaccgctgatgttcaccaccacaaacaccctcaacgatgaatgggaccagattcgcgccatcgagatcgattggcatgactgccctgaactgatgcactgcatcgacgttgatgatgtgttggccgtcattcctgccgcccccgacgccatcttgggctacctcattgcccgggctcagggcggtgacgagttggccacccgcactatcatccaagcgttcacaggcaagcttattttgatggccacggccaccaaggtgcgccgtactaatgacggcttcaatgatctgttggcgggtctgtgggagacgatcatcacttacccgttggatcgtcgccctgacaagatcgctgcgaacctcatcctcgacacgttgcaccgggttacccggttttggcgtgctgattcccccgatgaggaagaggctcacggtctgctgcccttccctgacactctcatcgccccagagcccgatgaggacgtcacagctagccaggccatcgccttggcggtggaccgcaactggattaccgaggacctagcccgcctcatgagccatatttactgtgacggtatgactggagctgatgcgggtcgtctgcatggctgcgctccagctacggtgcggtctcgatgccgtgatggtcgggccgtgttgcagcgcaacgccgagacgatcctggccgtctgctgatccctctcttgctcatgcctgccgccaccctacccctacctgctagaaacatagccatgtctccagcaacgcatctagcatatcttctagcaatttatctagctatgtatatagctgatgatctagctatcatatagctgtgtctccagcccaaatgacagcccaatggcatgcttgccacaggaaggtgcgtcagcctcccgaaatactggaaggagctttagcgtgcaggacatgaccagtcctattgaccgatccccgttcgaccgcactattgcggtgtggaaccacaaaggcggcacgttcaagacgtccgtcgtggcgaacctgggatacctgttcgccgccggtggcaacaaggtgctgctggtcgacatggacccccaagccaatctcgacatcgacttcggtatacccgcaggagaacgtgaacggggcatgggattagccgaggcgctgcgcgaggggacggcccttcccccaccacagcatctcagcgaaaacctccacctggtcagtggcggcccggccctccacgagttcaccgaccccgcatccttagcggccatcatcgaccgagtcaccaccgcacgctacgacctgctagctcaggcccttgccccgctggcctgggactatgacctcatcttcatcgactccgggcctgcccaaactctgctgtcccagaccatccttggagtagcccgctggctggtagtgcccacccgcaccgataacgcctcaatcactggcctcgtcgacgttcaagacgccatcgacggggttgcctcctgcaaccctgaccttcaactactcggcgttgtcctagccggcgtgggggcccgggccacccggatcgccgcagataaacgccacgccatcgacacagtgctgggggcaggaaccgttttcgatgcggtcatccactactccgagaaggtgtccgtgctcgcacgccagcagggcaagaccgtcgccgagctagccaacgagtaccacaacacccagcccgcctacacctacctagctaaaggccagaacatccccaacgtcgccaaggcagccgtcagcatcgaaactgattatctgaggctggccaccgagatcagcgaccgcatgttcaccagcgacgagcaggagcctgatcatgactgacgatccgactccatccgagcagaacaaccccaccagcgacgacatgcgcttggccgaagaatgggccaacagcggccgcacagtgggagccctgccgcgccgtcaacggcctcagcaacccacaccccgcaccaccagccaaccccctgtctcgtcccctgacacaccggctccgaaaaaaccccagaagacccccaccagccagcctggccgtcaacggatcaacgtcaccgtctacgttgtgcccgaactccatgagcggctgcgctcccgatcggcggcgacgggggggacggtctcggatctgg

SEQ ID NO: 310 - DNA, 2280 bp, Propionibacterium acnes
  source 1..2280: mol_type = genomic DNA
gacgccggccaccccaactactccgacccacacggtgaccccagctccggcctctgccggccactcgaccagcgacgagcacccaatccatacggataccgccgcagcggacaaggccagcgacgaggacgccctgtccccaatccaggtgggtttgaccgccagcgtcggactggtgctggtcgccggactgatcaccaccctcaaccgccgctaccggacccggttcacccgccagccccgcggcaaggccatgaccctgcccagcccggacgcccaaactgccgagatagcgctgcgcagcaccggggcgactgacactctgacgatcacctgcctcgaccaggcgctccgcgcgatcggcgcatggtgccaccactgcgggcacccgctgccacccctgctggccgcccgcgtcgatgacgaccggatcgacctgctgctatcccaggcggcccccgaccatcccgaggcggtggagctggccgccgacggatcggtgtggaccctcaccgccgaccggatcgacgacctgctagcccacaccgatgacaaccaagcggctccgtggccgtctctggtcacactgggacgcgacgacgacggcgcccacatcctcatcgacttggaagccgcaggaaccttgcacctgatcgccgatgacgaccaggtcgacgcggccctcgccgcgatcgccgtggaactggccacctgtgactggtccgacgaggtcaacgtcaccctggtcggccaggtgtgcccgggcctagaagacgcactagagtctccgaccctgacccgcgccaccgacgtggacgccctcctcaccaccctggaagctcgcgccgacgaccagcgacacatcctcaccgaaggaagccccctcgccgctcaccgagccgaccccgccatctccgacgggttcgacgccgaagtgatcctcctcgacaccgaactcaccgaagaccaccgcaaccgcctcgccagcctcgtcgaggctcttccccgcgtgtcagtcgccgcggtaacaaccagccccaccagcccagacgaatggtccctcaccctgacaggtgacccactagccgccgacctggctcccctcggctggcacatccacccccaaaccctctcccccgacctgtacaaccgcatggttgaactactcgccaactccgccgccgcagactacgaacccgccagctggtggaaccacgacgccgacgacgagcccaccaccgaccccaccaacgaggaagaatctaccccgagcaggcgagcccgcccgaatatccgcctgaccaccctgaccggcggcatcgacctatccagcgtcgacatcgacgacatcatcgacgaagccaaccaggccctcgacaacaccgaccagaccaccaaccaggttcgcgtcgacaccgaccaacccggcaccgacacccccttccccatcgacgacatcgacccgctgagctccgaccacccggtcctatccatcatcggccaccccgacatcacaggtgccactggaaccgttgggcgctccccgtggcgctgccaacagttggccctctacatcgctgagcatccgggagcatcgggggcgactatcgccgatgatttggggctatcagcgtcgacggtgcgctcgattgctacacacctgcgacactggttgggagccgacgatgccggggtggcttacatgccggcggcgacgcgcggctaccggctcgatgagcggatcgtcacagatgtggacctgatcgacgctgctgtggccggggcaggcattaacaccgctgagacggccacactggtggccattttgaagctgggccgcggacgggtcttcgctggggttcctgactcggaacttcgccagttcagggcgtcgatgtaccacgtggaggcccgcatcgtcgatgctgccctccaagtgacagaccgggccctggaagccggagacttggggctggcccggtgggcgctgacccaagggctactggtgtctcccgatcatgaggacctggtcgccggttgtctgcgcaccgaataccaggccggcaacatggacaaggtcgccgagctagttgatcacctgtcggctaccgcacgccgactgggcgtcgacctcaacgaggacaccacccggatcatcgatacggtcacccacgccgacaggagagcatcatgatctcccctgcactcatctccgtcaggaaggtccctatgcaccattatcgtcttggtatcggcactgccctcatcgccgtagcagcc

SEQ ID NO: 311 - DNA, 594 bp, Propionibacterium acnes
  source 1..594: mol_type = genomic DNA
gctgagaaaaattttgggtccgccctgcatatcggggcctcttcataccttcaaaagtgtgaagggaatacagactcttcgactggaattaaaatggtatatggcgtgtccggtccgcacccagctccacgatgcgccatagaggagccataacttcaccaatcgtatacgattggagtgtaggtgagcatctaccggtggccgacagtcagatacaagcatgggcggatgaagcagaagctgattatgacctcagcatgcttccgccgtctcgacgtggtcgcccaccggtggggaggggcccgggcactgtggtccctgtgcgcttcgacgcggacactctcaaggcgttgtcacaacgagcccctgacgaaggattgaccacgcgttctgacgcgatccgtgctgcggtttaaccagtggctcggcctcggctcgtaaacattatcggcgcgacaaccttactgatgacgctgttggttacgccgtagagcacatcttgtactcgtgggcgctcgacgatgccgatgatcctcgttgctggatgatgattcggtgttgacccagctggcctcctcatggagctagttatcc

SEQ ID NO: 312 - DNA, 2594 bp, Propionibacterium acnes
  source 1..2594: mol_type = genomic DNA
ttggtattggtaggcgatggtgtcaccggttttgttgcggatgacgtcgaagccttcgatgtcggaggggatgtcgtcggcgtcgtagacgacggtggtggtgacggggttggaggccgacatttggccgatggtcacgcgcagcatgtttttcaacgcggaggtgaggattgtcgtggcggtggggtttttgtctgcccagcgtttctcggcgatgtcgatcatgtcttggatggttttgacccatcctcggatgggatcgactttggtcagtttgatcccttcgaggaactcgatgggctgggtgatgggcccatctggtccggcttcggtgtcccagccttcgtcgatggctagtttcagttcggcggtatcgacccatgtttcgtgggtggtgccgggcacgttgggccaaaaccatcctgctcgtcctttggtgcgtttgaccggtagtaggccgatgtcgtcccaccaggatggcacggtgaagcggatgtggtagcgggccgggtgccaggggttgttggtgaacaggtcgcgggcttcggtggcgctgagcagagtggcgggtgcggcaccgatctctccggtcactgatccggcatacatgaatcggccgtcgatgtacacgaagttagggatagggccggcaggcacggtggggcgccagcccttttcgcggtcctcggggttgccgtcgtcgacgcatagttcgtagcggtgctgaggggaggtgtgttggatgagtgcgcccagttcggggtccatcggctccatgcgataggactcgggggtccgtagcttccagaggttgattccttctgctccggggcggtccatgagggcccagtcgcggtcgattctggtggcgatgatgtgggttaattcgcgccatgcccagcgggcctggattggggtgagggtctggccagggaaccattcatcagcgaccagaatgtcgaggttgcggtcggtttctttgtgggtgaaccggcctcgggcgggccgcccggacagcatgaacaggccccgcacgtgccagtcctggttgaactcgcgggtgtgagcgggggtgtcaggcagcagccaggattgaggctggtcggggatgttaccgcagacgatcaggcgtcgggcgttgtggtgtagcgcggttgttagcaggtctgacagggtcgcgtgcttggtgcgtcgtccccccagcactggcaggatctcgtttccggccgcgtcgactccccgggcggtgtcgatgtctagccacactgtttcggggtcgggggccgatgtggggcgggacggcgctgctcctggtcgtctctcatggtttcctcctttgggccagggagcggccggcgtcgagggcgttcatgcgctcgcgttgttcttcgcgtagttggtagacccggcctcgtgacactcctgctgcctcggcgatggtggtggccggcaggtggccgatggcggcagcgtcggcaaggacgtcacgccaggccaggtcaatggttcccagctgggctagagcttcgtcgcggcggcgggtggcatcagccactacggaggcccaccctgtggggtggatggtcttgacgacgattcggttgtggcggatggggccccatgcatcagcggggacttgccagccgtgattggcggcggactcggtgatcttgaggcgtcgctcaggtgcgcgggtgcgggcagtgacgtcggtgttccaggtctggactggtacccacgtcccctctcggatgcgttcgatgacgcacgtggtgacctcgtcggtgactgtgatgaccagacgataatctttcccgtctggggtggttcggtagctgggcatgtcaccctcccctatctgtcaaatgagctagacacagtgtctatttaatttgacgcaaagtcaagtgtgctagacgcctttgtgtggatccgcccgcccagacaggcactcacgtctcatgacccgccgcgacgtcttaacgaaaccaaaccgcttatagaaccgctccgcagcgggcccggagggcttcagttcgagggtgagaccgtgctcgtcggcccattggcagacttgtgtgaggatctgtgagccgtggccttgagtgtgggggacggcgtggacgcacatgagcatggggccgtggcggcgcgctggcggggccacgtaggctccgccatgccagtccggtgtggtctgccagcttcgccatgtcgcggtacgccagtggtgggcttcgagggccaccatgatcaccgcgacgacgacgagcgttgcggccccgatcatggccagctcaccctgaccaggccagttcccgcagatgatccagtctcttaacgcccagatgatcgcggcttccacgcctgctgcgatcgggatgagcaaggcagaacgaaggtgtcctgccatgatctcggtgatctcgctgcgatgccatgacaaggagaattcccacgactcttgaatcatgctgatgtgtgaacggcttcttcggcttcgccctgccatagtttctccaaacgacgctcagccagctcgtcgggacacggcgacagcctgccgcactcggagcagaccccgaagtggcgcg

SEQ ID NO: 313 - DNA, 2383 bp, Propionibacterium acnes
  source 1..2383: mol_type = genomic DNA
tggttgtcgaccacaacgatggttcccggtcaacgctgccgccggtggccgactcggatgccgagctggaatcccagatcgcccggatggcgaggaatgcgaccccgcggcgagccttcgacgccgatcacaccgatgtgacgatcatgcaccaacagaagttccgtatccacgcgatctcagcggaagtgtcattgcaaccgtcggtggtcatccgccaacatttgctcacccaaatcagtctgggggacctgtcacatcgcggaatgatgccggtggaagtggcccggttcctcgatgaggcggtacaagctggcaagtccatcgtggtcgccggcgagcagggtgcaggcaagacgacgtttttacgagcgttgatccacgccattccgatgcgggagcggttcgccacgttggagaccgatcaggagttgttcgctcatctgatgcctggccgggaaaacacgctggtgctgttcgcccgtgatggtaacggcgaggtggatccggcgactggcacccagcacggcgctatcgagatcgcccagctgattcctcctagcctgcgccaggcgttaactagggtcattgtcggtgaggtgcgcggcaatgaggcctcggccatgttccaggccatgcagtcgggtacaggcaccatgagcagtatccactccccgcgagcctctgaggtgccgtcccggctagcccaaatgatttcgatgggcccggtctacgatctggatcaggccatgctgcagatcggtcattcgatcgactacatcgtctttgttcgtaagcgtgacctgcctgatgggagccggctgcgatttgttgagcagatccgttcagtctcgcctggtgattcgacaactcccagtcttggcgaggtgtacacggctgactcgtggacaggccagccgcttacgccactcatgcccggatcggccgccgacgagctgtctcacttcgcccgagacctggattactgcgaggcccactcatgaacactcccgcactaaccagcgccctcatcgtgaccgggttggggctgatcctggccatcgacgggctggtcccggcgccgcctcgacctggggccccgctgagcccggaccaaaggtgggccaggctcacccaccgtcccacaggagcggccgggcgccgccgggacctgcgctgggggctggctgttctcgtcggcgtcgtgctgtttgtgctcaccgggtgggtcgctgcgctggcgttgggccccatcatcgtgctgctggcccccaccctgctgggggcggccccaccaaccgacatcccgctgatggaggcgctggatcggtgggtgcgtcaggtcgctgcggtgctgccacaggggcgagacatcatcacagcggtgcggatctcacggccgcgggccccgaagctgatcgccgggtcggtggatcaactggtgtcccggttggatggccgtatggagccgagggaggcgttccagcggatggccgacgagctggactcggctgaggctgacgcggtgctggcctcactagcgttggcggccactcacccgcggggagcctcgacaacgttgaaggctattgctggcaacatccaacagcggttgaaagtgctgcggcaggtggaggctgagcggtctaagccgcgtaactcggtgcgccagatcacactggtcacgatcgccatgttcggggggctgctcgtgatcggacggtcgtttctggccccgctggcgacccctcccggtcaggtgctggtggccgtggcggtggtcatgtatgtcatcgcactagtgcagatgtatcggatggcgcggccccgtcgacgcacccggatcatggtcaggaggacccgatgaccattactgctttgtccctgctggccggggccatcgtcactgtcggactgctggtcatcgtggcagcgttccgcccagccccaggccctgacctggttgccgctctggaggtggtgtcgggtcgcacctcaagcgtcgccgagaacgtcgaccagacccggatcgggcggataggtcgcagcgtgacccgcacattccatgtgtcggtgtccccggccatgcgggccgcactgcgactccaaggcacgacccccgaagcgttctacggtcgacgcctgatctgcgcactgatcggggcgatcctgccgtggctgctcaacgcggtagccatcgcggtaggggcgaattccccgaacctactcatcccttcggcgctgtgtgtggcgttagctggcgctggatggatgctgccggcagcacggttgaaggctgcggccgggcccaccaacgatgactcgttcgaagcgctgctggtattcatcgatttggtcgtgctggaacggctcgccaacgaaa

SEQ ID NO: 314 - DNA, 2238 bp, Propionibacterium acnes
  source 1..2238: mol_type = genomic DNA
gacgccggccaccccaactactccgacccacacggtgaccccagctccggcctctgccggccactcgaccagcgacgagcacccaatccatacggataccgccacagcggacaaggccagcgacgaggacgccctgtccccaatccaggtgggcttgaccgccagcgtcggactggtgctggtcgccggactgatcaccaccctcaaccgccgctaccggacccggttcacccgccagccccgcggcaaggccatgaccctgcccagcccggacgcccaaactgccgagatagcgctgcgcagcaccggggcgactgacactctgacgatcacctgcctcgaccaggcgctccgcgcgatcggcgcatggtgccaccactgcgggcacccgctgccacccctgctggccgcccgcgtcgatgacgaccggatcgacctgctgctatcccaggcggcccccgaccatcccgaggcggtggagctggccgccgacggatcggtgtggaccctcaccgccgaccggatcgacgacctgctagcccacaccgatgacaaccaagcggctccgtggccgtctctggtcacactgggacgcgacgacgacggcgcccacatcctcatcgacttggaagccgcaggaaccttgcacctgatcgccgatgacgaccaggtcgacgcggccctcgccgcgatcgccgtggaactggccacctgtgactggtccgacgaggtcaacgtcaccctggtcggccaggtgtgcccgggcctagaagacgcactagagtctccgaccctgacccgcgccaccgacgtggacgccctcctcaccaccctggaagctcgcgccgacgaccagcgacacatcctcaccgaaggaagccccctcgccgctcaccgagccgaccccgccatctccgacgggttcgacgccgaagtgatcctcctcgacaccgaactcaccgaagaccaccgcaaccgcctcgccagcctcgtcgaggctcttccccgcgtgtcagtcgccgcggtaacaaccagccccaccagcccagacgaatggtccctcaccctgacaggtgacccactagccgccgacgtggctcccctcggctggcacatccacccccaaaccctctcccccgacctgtacaaccgcatggttgaactactcgccaactccgccgccgcagactacgaacccgccagctggtggaaccacgacgccgacgacgagcccaccaccgaccccaccaacgaggaagaatctaccccgagcaggcgagcccgcccgaatatccgcctgaccaccctgaccggcggcatcgacctatccagcgtcgacatcgacgacatcatcgacgaagccaaccaggccctcgacaacaccgaccaggccaccaaccaggttcgtgtcgacaccgaccaacccggcaccgacacccccttccccatcgacgacatcgacccgctgagctccgaccatccggtcctatccatcatcggccaccccgacatcacaggtgccactggaaccgttgggcgctccccgtggcgctgccaacagttggccctctacatcgctgagcatccgggggtatcgggggcgactatcgccgatgatttggggctatcagcgtcgacggtgcgctcgattgctacacacctgcgacactggttgggagccgacgatgccggggtggcttacatgccggcggcgacgcgcggctaccggctcgatgagcggatcgtcacagatgtggacctgatcgacgctgctgtggccggggcaggcattaacaccgctgagacggccacactggtggccattttgaagctgggccgcggacgggtcttcgctggggttcctgactcggaacttcgccagttcagggcgtcgatgtaccacgtggaggcccgcatcgttgatgcggctcttcaggtgacggatcgggctctggaagccggggacttggggctggcccggtgggcgttgacccaagggctactggtgtctcccgatcatgaggacctggtcgccggttgtctgcgcaccgagtaccaggccggcaacatggacaaggtttccgagctggtcgatcacctgtcggctaccgcacgacgcctgggcgtcgatttgagcgccgacaccacccggatcatcgatacggtcacccacgccgacaggagagcgtcatgatctcccctgcactcatctccgtcaggaaggttcctatgcaccat

SEQ ID NO: 315 - DNA, 2099 bp, Propionibacterium acnes
  source 1..2099: mol_type = genomic DNA
gacgccggccaccccaactactccgacccacacggtgaccccagctccggcctctgccggccactcgaccagcgacgagcacccactccatacggataccgccgcagcggacaaggccagcaacgaggacgccctgtccccaatccaggtgggtttgaccgccagcgtcggactggtgctggtcgccggactgatcaccaccctcaaccgccgctaccggacccggttcacccgccagccccgcggcaaggccatgaccctgcccagcccggacgcccaaactgccgagatagcgctgcgcagcaccggggcgactgacactctgacgatcacctgcctcgaccaggcgctccgcgcgatcggcgcatggtgccaccactgcgggcacccgctgccacccctgctggccgcccgcgtcgatgacgaccggatcgacctgctgctatcccaggcggcccccgaccatcccgaggcggtggagctggccgccgacggatcggtgtggaccctcaccgccgaccggatcgacgacctgctagcccacaccgatgacaaccaagcggctccgtggccgtctctggtcacactgggacgcgacgacgacggcgcccacatcctcatcgacttggaagccgcaggaaccttgcacctgatcgccgatgacgaccaggtcgacgcggccctcgccgcgatcgccgtggaactggccacctgcgactggtccgacgaagtcaacgtcaccctcgtcggccaggtgtgcccgggcctagaagacgcactagagtctccgaccctgacccgcgccaccgacgtggacaccctcctcaccaccctagaagctcgcgccgacgaccagcgacacatcctcaccgaaggaaaccccctcgccgctcaccgagccgaccccgccatctccgacgggttcgacgccgaagtgatcctcctcgacaccgaactcaccgaagaccaccgcaaccgcctcgccagcctcgtcgaggctcttccccgcgtgtcagtcgccgcggtaacaaccagccccaccagcccagacgaatggtccctcaccctgacaggtgacccactagccgccgacctggctcccctcggctggcacatccacccccaaaccctctcccccgacctgtacaaccgcatggttgaactactcgccaactccgccgccgcagactacgaacccgccagctggtggaaccacgacgccgacgacgagcccaccaccgaccccaccaacgaggaagaatctaccccgagcaggcgagcccgcccgaatatccgcctgaccaccctgaccggcggcatcgacctatccagcgtcgacatcgacgacatcatcgacgaagccaaccaggccctcgacaacaccgaccagaccaccaaccagaccaccaaccaggttcgcgtcgacaccgaccaacccggcaccgacacccccttccccatcgacgacatcgacccgctgagctccgaccacccggtcctatccatcatcggccaccccgacatcacaggtgccgctggaaccgttgggcgctccccgtggcgctgccaacagttggccctctacatcgctgagcatccgggagcatcgggggcgactatcgccgatgatttggggctatcagcgtcgacggtgcgctcgattgctacacacctgcgacactggttgggagccgacgatgccggggtggcttacatgccggcggcgacgcgcggctaccggctcgatgagcggatcgtcacagatgtggacctgatcgacgctgctgtggccggggcaggcattaacaccgctgagacggccacactggtggccattttgaagctgggccgcggacgggtcttcgctggggttcctgactcggaacttcgccagttcagggcgtcgatgtaccacgtggaggcccgcatcgtcgatgctgccctccaagtgacagaccgggccctggaagccggagacctggggctggcccggtgggcgctgacccaagggctactggtgtctcccgatcatgaggacctggtcgccggttgtctgcgcaccgaataccaggccggcaacatggacaaggttgccgagc

SEQ ID NO: 316 - DNA, 2126 bp, Propionibacterium acnes
  source 1..2126: mol_type = genomic DNA
tgggctgtagaggaggtcgatgtcgcgggcagggtcgtcgggttcttcggttacctcgggtggggtcgatctggctgtctcggtgtcgtcggccaggtcggctcccaggatgcgttcccattcggggctggttttcttgcccgctgaggccatcgtctcgtcgatctgttcgtcagtgggccacacaaatttctttttggtccaggtcgtggtgtcgggtcgcagctgatccagcagttccaggtcttgcggggagtgggccttgcgggggtcgggggtgtagaagaattggacttccttgggggctgattcgccggataggtaggtgccgcggccgcgtttgccgaacgggattcccacgccgacgtgttcggagccgaacatcatgcgggctccgtcagcggacaggggtccggtggcggcacgcccggagaagttgtctcggatttcgccgcccaggaactcggcgtcggggcgttgggtccccagatcgacgtggatacggcaggcggctgccatgcgcagcagggagccgatccagccgaaaacggggcattctccgggcatcccagagaccttgatcgttgaccaccagtttttcgcgttgccgtagaactggcggtactcgtcgatgaggaccagcacgcgggtgaagtcggtctcgcgggccccttcttcttcgatgcggcggtagcggtcctccatgagagaccacagccagtggatgagggcgacctggtcggggacggtagtggcgaccatctcgatgttgggccactcccgcaggcccaggtactcgatgcgtttagggtcgatgacgaagacgcgccagttgcggcgggcaccctcgacggcgtcgccgatcatggacaccgtttttccggtacgggtgcggccggccttgagctggtgggccatgacaccggagatgtcccagaaacaggtgttgccgtcctcgtcgacggcctgggggattttctcccagtctggggagtctgggcccggaagggccacgggtcggggcaccatcgagggcagggggtggcggcgggtgacggtgatggtgtcgtgttccaggtcgaagtcgctgcgccactggccgagcatcatcgccgaggtcaccgcggccaggcgcaattggatgttcgggctggacaaatgggcgccacgttggtggtgaatggtgaagccgtccaggttcccccgatcggttttccaggaatcgacggtgaccgccgacccatagatctgagtggctacttctttagcccgttccttgtctcggtccagatcggttttgtcagggtcaggggtcggggcgcggtattgcaggacgaaccggcccgccgggatcgttgcggatgtcaccgtgaactctgccggcgaccaggcagccgcggccgcctgggtgagggccattggcatggtctcgacggcagcctcctcgggggggatggtgagggtcaggcgtcgcggatgcgtcttcttgcgattccatgtgactttctgcctcaccggcaccttcgccgccgactgaatggctaggcgagctgattcggcagtttcggtacgccggccagcgcgtagcgcccgtcgtgcgtgaaggctgcccaccacagcacagcccatacacggcagccaccagcgcggatcagcggctgctgcatagcccccggtagctagtaccgcacctgaccagccggccgcgatacttttccacgccggtttcgcaccaacagtcggggcagacgctggccgcttcgagaccgaggagggacgagacaagggagtgctggtcatgccgcggcctccttgtggcaggtcatttcacaggcatgccggccagcgatgatgccgtggcgcaccgccccggtagccgcatagaccgcgcacaactcaaacacggggcacccatcgcaggccgccgggttcatgctttctttgtcccacgatggtgggtcatcggtgcacggcacggccaggccatcctgttgagcggcgctgatagcggtgaataggcgcagctgggcgcgaacttggtctggggtcaggttgacggtgcgggctacacgcatggggttccttcctcttcaccagtgaaggttccctagacccggccgatgtgc

SEQ ID NO: 317 - DNA, 1956 bp, Propionibacterium acnes
  source 1..1956: mol_type = genomic DNA
ccgccgtctcgacgtggtcgcccaccggtggggaggggcccgggcactgtggtccctgtgcgcttcgacgcggacactctcaaggcgttgtcacaacgagcccatgacgaaggattgaccacgcgttctgacgcgatccgtgctgcggttaaccagtggctcggcctcggctcgtaaacattatcggcgcgacaaccttactgatgacgctgttggttacgccgtagagcacatcttgtactcgtgggcgctcgacgatgctgatgatcctcgttgctggatgatgattcggtgttgacccagctggcctcctcatggagctagttatcctcatctacgacgatggctatgaactcctgatccacgccatgaaagcccgccctcagtatctgagctacttcgctatctagtgttgttgggcgagttgaactcaacttttctccgacgcaagcgccaataaaaggctgatccatccgaataccaccaaacacggctgaagtgtggaacagattcagcaagacagggtgcggtgctcgggtgcgttggggagatgaggatattcaggcttctggcgggatgtggcttgatgacgtccaggatcaccggttcggttttgaaggtgccttgcattaatgtcgacagggtcgtacgactcgaggactggatcgaccagcccgttgcgtctgaagaacttcatccaccccggtggagctccggccgcgtactggtgcaacggatcattagcatgggtagcgtgagtatgccttcgatcgtggtcagtgctgtcatcatccaagattctgacgggcggcttctcactgtccgtaaacgaggcgccgaggcattcatgctgccaggcggcaagccggagcccggcgagaactcgcgtcaggcagtagtccgggaagtgcacgaagagctcggcgtcgcattgtcttccgacgacctgcgtcgggtgggagtgttcaccacgcgagcagcgaatgaggccggccatcaggtggtggcgacgattttcacccacaccccggttgcggtgagtgagccagctgctgagatcgagcagattcgttggctcgattggagtgtcgacgccctgcctgatgacctggccccgctgctggtcgaggcagtcatcccgtggctgcggcgccgtatccggtcggtcgctgtattcacgggtgcgaaggatggaaccgaccctcattatcgtgtcgaagcaaccgccttgggccggggtctcgcacacgccgggatcaccctggtttatggcggcgggaaggtcgggatgatgggtgctgttgctgatgcggccctcgctgctggcggcgctgtgatcggagtgatgccgcagcacttggtggacggggagatcgcccatcctagtctgactcacctcgaggtagtgcggactatgcatgagcgcaagcagcggatgagtgacctagctgacgcgttcgtcgcgctacccggcggcggcggaacccttgacgagctattcgaagcatggacatggcagcagctcggtgtacacagcaaacccgtggccttgtacgactcgaccttctgggcaccgctgaccgcgctactcaaccacatgaccatcgaaggcttcatccgccctgaggaccgcgcctcgctcgtgatcgccgataccatacatcagctgatggccgatcttgagggatggaccccaccaccaccgaagtggcgctcgtgacatagaacaaatgattctgactatggctcattgacatctgcgcagcggctactagctccattgacttcaaatcgggccttggccgaggctcggttcaggtggcccggaatggatccccacaaattgaatgctcatgatcgaggtgatgaacgcccactctattgtcctacgcccggttgtatccagcgagcaattgaaggtgctgcgcctgttggtcgaccaggccgagccactca

SEQ ID NO: 318 - DNA, 2383 bp, Propionibacterium acnes
  source 1..2383: mol_type = genomic DNA
ttggtattggtaggcgatggtgtcaccggttttgttgcggatgacgtcgaagccttcgatgtcggaggggatgtcgtcggcgtcgtagacgacggtggtggtgacggggttggaggccgacatttggccgatggtcacgcgcagcatgtttttcaacgcggaggtgaggattgtcgtggcggtggggtttttgtctgcccagcgtttctcggcgatgtcgatcatgtcttggatggttttgacccatcctcggatgggatcgactttggtcagtttgatcccttcgaggaactcgatgggctgggtgatgggcccatctggtccggcttcggtgtcccagccttcgtcgatggctagtttcagttcggcggtatcgacccatgtttcgtgggtggtgccgggcacgttgggccaaaaccatcctgctcgtcctttggtgcgtttgaccggtagtaggccgatgtcgtcccaccaggatggcacggtgaagcggatgtggtagcgggccgggtgccaggggttgttggtgaacaggtcgcgggcttcggtggcgctgagcagagtggcgggtgcggcaccgatctctccggtcactgatccggcatacatgaatcggccgtcgatgtacacgaagttagggatagggccggcaggcacggtggggcgccagcccttttcgcggtcctcggggttgccgtcgtcgacgcatagttcgtagcggtgctgaggggaggtgtgttggatgagtgcgcccagttcggggtccatcggctccatgcgataggactcgggggtccgtagcttccagaggttgattccttctgctccggggcggtccatgagggcccagtcgcggtcgattctggtggcgatgatgtgggttaattcgcgccatgcccagcgggcctggattggggtgagggtctggccagggaaccattcatcagcgaccagaatgtcgaggttgcggtcggtttctttgtgggtgaaccggcctcgggcgggccgcccggacagcatgaacaggccccgcacgtgccagtcctggttgaactcgcgggtgtgagcgggggtgtcaggcagcagccaggattgaggctggtcggggatgttaccgcagacgatcaggcgtcgggcgttgtggtgtagcgcggttgttagcaggtctgacagggtcgcgtgcttggtgcgtcgtccccccagcactggcaggatctcgtttccggccgcgtcgactccccgggcggtgtcgatgtctagccacactgtttcggggtcggggggccgatgtggggcgggacggcgctgctcctggtcgtctctcatggtttcctcctttgggccagggagcggccggcgtcgagggcgttcatgcgctcgcgttgttcttcgcgtagttggtagacccggcctcgtgacactcctgctgcctcggcgatggtggtggccggcaggtggccgatggcggcagcgtcggcaaggacgtcacgccaggccaggtcaatggttcccagctgggctagagcttcgtcgcggcggcgggtggcatcagccactacggaggcccaccctgtggggtggatggtcttgacgacgattcggttgtggcggatggggccccatgcatcagcggggacttgccagccgtgattggcggcggactcggtgatcttgaggcgtcgctcaggtgcgcgggtgcgggcagtgacgtcggtgttccaggtctggactggtacccacgtcccctctcgggcgcgttcgatgacgcacgtggtgacctcgtcggtaaccgtgatgaccagacgataatctttcccgtctggggtggttcggtagctgggcatgtcaccctcccctatctgtcaaatgagctagacacagtgtctatttaatttgacgcaaagtcaagtgtgctagacgcctttgtgtggatccgcccgcccagacaggcactcacgtctcatgacccgccgcgacgtcttaacgaaaccaaaccgcttatagaaccgctccgcagcgggcccggagggcttcagttcgagggtgagaccgtgctggtcggcccattggcagacttgtgtgaggatctgtgagccgtggccttgagtgtgggggacggcgtggacgcacatgagcatggggccgtggcggcgcgctggcggggccacgtaggctccgccatgccagtccggtgtggtctgccagcttcgccatgtcgcggtacgccagtggtgggcttcgagggccaccatgatcaccgcgacgacgacgagcgttgcggccccgatcatggccagctcaccctgaccaggccagttcccgcagatgatccagtctcttaacgcccagatgatcgcggcttccacgcctgctgcgatcggga

SEQ ID NO: 319 - DNA, 718 bp, Propionibacterium acnes
  source 1..718: mol_type = genomic DNA
ccggggccctgctgctggtgtgggacgtcaccgttttgaccgggcccactctcggccaccgcgtgcgtcctctcagtaaggacgccgagctgactgcccggcgctggctcgaccaggtcgccgacaaccccggcttcctcgacacccttatcgaggccgcccgcatcaccgatggatggcatcacgcgacgcctccgcacattcaggccccttaccggacccttcatcagtgaacggaggtacaacgacatgaccagcgacattgacattgaccggacccacaaacccgacgaccgcgccgaggctcctctttaccggtcctgggccaggagactcgtgcacgtctccgggatgccctggcgtatcgtcgccgccttggccggggtctcccccacctccatgcaccggcttctattcggccgcaacggtcgacccgtggaatggatcggcatcaatgatgctcgcgccctgatggatatcggcatcgatgatctcgcctcagcgtccaccgaccgtatcccggcccgcgaatcccgcgagctgttggtagccctgcacaccctcggctggaccgatgagcatctaagccgctggctgaccagtcccgacctcgacctggccaccacccccaaggccctctacgtcacccggctatccgccgcccgcatccaggccacctacgacatgctcatcagccagcccgtccgccgctgcggcc

SEQ ID NO: 320 - DNA, 2014 bp, Propionibacterium acnes
  source 1..2014: mol_type = genomic DNA
ccggagtatctggacaaggccgtgctcactgcgttgtatcccgatgggttgcccttcgacgaggacaccgaggagccgggcgagaatgccgggcaggaggagcttgcgatgactggatgagcccgaacatggttgaaggccgccccgccaggcgaccttcaatcaatggtttcggttgtcagctgcagccacccttgccaggtgctgtggttcttctccagaggaggagggaccgccatgaagacccagaagatctagaagatccaaaagaaccggtttcggctgttgcttcggtcttcatggtagctgatagcccgcgtcgttggaagtgcgacgacgccgatcctcatcggtatcgcaccctgttccagggtcgagaatgtgaaggattaacaaccatgacaagtcatgagacgccctccctgagggcgtcatgaccgctttaattcaagctctgccgacagctgaactgtctgctggacctggtgctagcagtccagctagaccctctgctgagggcttcatcaagattcatcacgaccttattagtgcgggcgtgtcgggtaacgcgatggcgttgttcgtcgcgttacgtaaccagcccggctgtgatcagtggacccgtcactcgtacctgcggctagcccaatggtgcggctgggatgggctgtcggaggcggcgggctgtaagcgggtgcagcgggccgctgctgagctcgctagcggtggttggctggaatcgcgggtcggccatgatcgtcgcaccgctaagacgctggtgtggcatcggttgaccagccccgacaccgaccgctgggagcaattgccgcggattgtgtgggcgaggatctgccagatcgccggggagacgtcgggagagtgggtgaggcattggctggtgtggcggatgctggccggtcgtactggtgtggctcaggcccctacgtccatcgtggctcggttcctgggctgttcttcgcgccaggtctctcatatccgtggggctctcgttgatgccggtctgctcggctgtgacgaggtctcgggggcggcgagccgggtgtggttcccctcgatggccgaggagtgtgcagcggatcgtgaggtggtcgatggggccgtcgtcgatgctgaggtgggctctggtgaaggtgtcgaggagggcggggaacccctgtcgattttgtccacccacccctgtcgattttgtccacccacccctgtcgattttgtccgccaagtattagacaaaccattagacagtgaattagaccctgggtcgcgtcagcgtgttagctcaccaacgcgcgcgcgtgcggcggccgagccgccgaagccaaagaaacccacaccaccaacgcctgaaccagcagcccccgcttcagacagtcctgtgtcagcgcacgctgatgaggctgccgagttggcgtggcagttcgtggggtggtgtcctcagctggtaggggcaccgaagaaggtgcgtggccagctccgtcagctggtcgctgccgagatccgccggaatccgggctggctggatgcgccagcgttggaggttgttgcccagcgggtacgtgctgaaggtgcgctgggggtccagcactgcgagattgtgcgagccgagctgcacggggtgatcgccgaccagaaggccgcccccgcccgccccgacgccctgcacgcgcgggagcccaagtggtgggacgacgtgtactacgaaggaaacacaaccgtgtggacgtacgactctgacgaaaccagtgacgacgacgaggcgtggaaccggtcgcaggtatgtcatgttgctgagcgtgacgacatggctggcgggattgctaccaacctgctggcctcccacgctgatgatccgatggcctggctgactcgccgtcaaaccatgctgatggctcgtttcccccacgcccagaacgaggtcaccgcgatgtgccaaatcgtgcgcaccgccctggaggccgacctggccgccggaacccggtgggaggaccgatgaggg

SEQ ID NO: 321 - DNA, 1950 bp, Propionibacterium acnes
  source 1..1950: mol_type = genomic DNA
tcggtgtccccggccatgcgggccgcactgcgactccaaggcacgacccccgaagcgttctacggtcgacgcctgatctgcgcactgatcggggcgatcctgccgtggctgctcaacgcggtagccatcgcggtaggggcgaattccccgaacctactcatcccttcggcgctgtgtgtggcgttagctggcgctggatggatgctgccggcagcacggttgaaggctgcggccgggcccaccaacgatgactcgttcgaagcgctgctggtattcatcgatttggtcgtgctggaacggctcgccaacgaaacctccgtcgacgcgctcaccaatgcggcaaacatgtcggactcgccgctattcgtccagatccgtcaagtcctcaaccgtgcctccctggaaaacgtcgacccgtggaacgggctagaccggctagccgaggacatcaaactgcccgaactcaccgatgtggtctccatcgcccgcctccaaaacgaaggcgcctccctcgtcgacagtttccgggcccgagtcgccgagttacgcgacgcctacctgctgcgcctgcaacaagaatccaccgccatcacccagcggcttggtttgtggacgatcctgcaagccggctcggtcatgctcatcttgctgggggcggccgccctcacactcatcacagccggataaaccgacaccgtgtcgagcccccatatgggccgcgaacctttcataatgatgcctgtaagcaccacaatattgatcacaacctaacaatgaaggagaaatcatgatgaccgatctcgacctggctaaaaaacagatcacctggctggcggcgcacctgcgttcccggatcgttgacgagcgtggcggtggtagctctaccgtggagacactgatttggattggtgtcatcgtggcgctggtgattggtgtgggcgtcggggtgacggcctatatcaggtcgaagatgcctcactgacgacgatgcgtagcaggttcacaactgatcagcgtggcggtggtagcgcgtcggtggggatgctcctgctgatgcctgcgatcatgctgctggcattcggtgggatcgaggtcgggatgtggtgtcacgcccatcagtcgaccatcgcggcagcccaaagcgccgcggaagctcagcgtgtcgtccatccggtcccggggtcggcacaggaggcagcctcgcagatcactagtcatggcggggtgcgtgatacccggatatcggtcagtgatgacggggccactgtcacggtgaccgtggtgggccgggccccatcgatgctggggctgcatcttcctgctgtgtcgtcgacagcgtcgatgcccaaggagcgcctgtcgtgaggcgaagtgagcgcggcggagcaagtctaagcgtcgaggtgctcatgtgggcgccgatcgcgctggtgatcatcgggtttgttgtgggtatcggccggatgtcgatggcccaggacgcggtgagtggcgcggcgggtgctgcggcccgtgcggcgtcgttggagcgtgatggacagtcggctcagtctgcggcgcagcaggcggcgtcggcgaacctgtcgtccggtgggctggcatgtgcgccgagtgtgagcgtggacacgtcagtgtttgcccgtcctgccgggcaggcgggcacggttcacgccacggtcacgtgtgtcacctcgctgggtcttggattcgggtcccggacggtgcacgcaacggggtctgccccggtagacacctatcgggaaaggagaggctgagatggcccgcgatgagcgtggtggcggctcggtgtcggtgtggatgctgctcatggtgccggtgattctggtcatggccggcctggtttttgacgggtcccgtcagatatcggcaacccaggcggcccaggacgcggcggttgcggcatcccgcgccggaactgatgcggcagcg

SEQ ID NO: 322 - DNA, 2060 bp, Propionibacterium acnes
  source 1..2060: mol_type = genomic DNA
gcgagccacgaccatcgccaagctgaatggagagcgagcatgagcaccacccctgccgggttcgacttcgacgctctggccgagtgggccgagagcgatgaggcgacccacaccccgcaaaccagccccgtgttccggggcaaggacgccgcgcgcgccagccgcgcattcctcggccgaggacggcccaccctcggcgcggaccacgccaccggcgagggccggtcgccccgccgtcaggtacggctcgacgcacgcaccaacgcgcgactcgacgcctacgcagccgcaaccggcaccagcgcctcccagatcatccgcgacgccctcgctgactacctgcccgcctgatcccaccccaatccactcgggcgcctgtcagtgccccctcttctgggtggtggtccggggcgtcaccgccccggaccagttggggagtcatctcagttgaaataagcgattagtgatacgcccctcctgctttccggtgctgtcatgagcgtctgacaacagcgacacctcggggcagccgacggacagtcctctggctgccgctctgatcccatgcccacggcacgaaggtgtcggacagctcggtctcatcatgtgcccaaatagcgtcgtgggcctgtcgccaagcttctcgggagccccacacgggcacgaccgggccacaccggtgtcctggtctccagtgtcgcgacactgtcgatttcggtacgtgcaatgcggcggcggtttgacggatcgacatcccagactcccgcgcgtcccagatcgccatgtggagagtatttgcctccagtgcggccgccacacttgcacgctctcgcgcacgctcgaatgcccgcctagtgctctcaaatgtcgtcacgacgcctccccctgaaaatactcagggtgtcccacggtgggacaccctgagtatttcataccccaactcgcctcaccacacgtcgacctcgacaccgatcaagcgacccgtatcagcgacattgccgtaccgctgccccgcctggtcctccagccacgacaacgcatcccgaaacagcccgacgtcttccaaagctaaaccacagtcgtagccgcccttgtcccccaaccgcaccatctggcgctcccggtggcctccctcgtcgacctcgatccacagtttcgcgtgcatccgctggcctcggccctctgacaggatctcggtgagcaggtcggacgcctgccctcgcgcatcctcgttactgcgggggaattggagtatgtgggaggaacgatgatgggggaggttggtgacctcatggcgcagcaggttgcgcttgtgcatcttccgctcaaggcgctcgggctgacctgttgacggggttgagccgtggcgccgcttcctcggcggggtctcgatccgttgctcttccggcggttcggcgtcaggttgtggtgcgcgatctcccctaggacgggggggatcgccacctatatccgagggacgatgagacggccttccacgcttgctgcgcactttcgcagcccgccccttgcggtcacgtcgacgcggcggcggagtgacgtcctcaccgcgcgctaactgcgtcaacgccgccaccaggttggtgcccggtttcagccctttcagcacgaaccgcaccaggcgggggtctcggccgattcgtcgggcaatctcggcttggctccacccctcggccaacagggtgcgcaacaagtcttgggcccggttatcacgctcagtcactggtcgccccctcggggagtcctacttgctcggcctgctctgatagagcagcccgctccgatccggtctgaggcgcttccaaagggcccggcaagacacctttgacacgcagccgcccgtccttgccgtcatcgccgcccccctgggccacagggagcgcccaggggggcacgttgctggtgtagatggcgtcgccgtggatagccagcacggtgcgggagttcatgcgtagtgctcctcccttggttgtggcgttttttccggtggtggggtcggcgatgggtgtgttgagggtgcgcacgcgggacaaggcccagat

SEQ ID NO: 323 - DNA, 1856 bp, Propionibacterium acnes
  source 1..1856: mol_type = genomic DNA
ttggtattggtaggcgatggtgtcaccggttttgttgcggatgacgtcgaagccttcgatgtcggaggggatgtcgtcggcgtcgtagacgacggtggtggtgacggggttggaggccgacatttggccgatggtcacgcgcagcatgtttttcaacgcggaggtgaggattgtcgtggcggtggggtttttgtctgcccagcgtttctcggcgatgtcgatcatgtcttggatggttttgacccatcctcggatgggatcgactttggtcagtttgatcccttcgaggaactcgatgggctgggtgatgggcccatctggtccggcttcggtgtcccagccttcgtcgatggctagtttcagttcggcggtatcgacccatgtttcgtgggtggtgccgggcacgttgggccaaaaccatcctgctcgtcctttggtgcgtttgaccggtagtaggccgatgtcgtcccaccaggatggcacggtgaagcggatgtggtagcgggccgggtgccaggggttgttggtgaacaggtcgcgggcttcggtggcgctgagcagagtggcgggtgcggcaccgatctctccggtcactgatccggcatacatgaatcggccgtcgatgtacacgaagttagggatagggccggcaggcacggtggggcgccagcccttttcgcggtcctcggggttgccgtcgtcgacgcatagttcgtagcggtgctgaggggaggtgtgttggatgagtgcgcccagttcggggtccatcggctccatgcgataggactcgggggtccgtagcttccagaggttgattccttctgctccggggcggtccatgagggcccagtcgcggtcgattctggtggcgatgatgtgggttaattcgcgccatgcccagcgggcctggattggggtgagggtctggccagggaaccattcatcagcgaccagaatgtcgaggttgcggtcggtttctttgtgggtgaaccggcctcgggcgggccgcccggacagcatgaacaggccccgcacgtgccagtcctggttgaactcgcgggtgtgagcgggggtgtcaggcagcagccaggattgaggctggtcggggatgttaccgcagacgatcaggcgtcgggcgttgtggtgtagcgcggttgttagcaggtctgacagggtcgcgtgcttggtgcgtcgtccccccagcactggcaggatctcgtttccggccgcgtcgactccccgggcggtgtcgatgtctagccacactgtttcggggtcggggggccgatgtggggcgggacggcgctgctcctggtcgtctctcatggtttcctcctttgggccagggagcggccggcgtcgagggcgttcatgcgctcgcgttgttcttcgcgtagttggtagacccggcctcgtgacactcctgctgcctcggcgatggtggtggccggcaggtggccgatggcggcagcgtcggcaaggacgtcacgccaggccaggtcaatggttcccagctgggctagagcttcgtcgcggcggcgggtggcatcagccactacggaggcccaccctgtggggtggatggtcttgacgacgattcggttgtggcggatggggccccatgcatcagcggggacttgccagccgtgattggcggcggactcggtgatcttgaggcgtcgctcaggtgcgcgggtgcgggcagtgacgtcggtgttccaggtctggactggtacccacgtcccctctcggatgcgttcgatgacgcacgtggtgacctcgtcggtgactgtgatgaccagacgataatctttcccgtctggagtggttcgatagctgggcatgtcaccctcccc

SEQ ID NO: 324 - DNA, 1832 bp, Propionibacterium acnes
  source 1..1832: mol_type = genomic DNA
ttggtattggtaggcgatggtgtcaccggttttgttgcggatgacgtcgaagccttcgatgtcggaggggatgtcgtcggcgtcgtagacgacggtggtggtgacggggttggaggccgacatttggccgatggtcacgcgcagcatgtttttcaacgcggaggtgaggattgtcgtggcggtggggtttttgtctgcccagcgtttctcggcgatgtcgatcatgtcttggatggttttgacccatcctcggatgggatcgactttggtcagtttgatcccttcgaggaactcgatgggctgggtgatgggcccatctggtccggcttcggtgtcccagccttcgtcgatggctagtttcagttcggcggtatcgacccatgtttcgtgggtggtgccgggcacgttgggccaaaaccatcctgctcgtcctttggtgcgtttgaccggtagtaggccgatgtcgtcccaccaggatggcacggtgaagcggatgtggtagcgggccgggtgccaggggttgttggtgaacaggtcgcgggcttcggtggcgctgagcagagtggcgggtgcggcaccgatctctccggtcactgatccggcatacatgaatcggccgtcgatgtacacgaagttagggatagggccggcaggcacggtggggcgccagcccttttcgcggtcctcggggttgccgtcgtcgacgcatagttcgtagcggtgctgaggggaggtgtgttggatgagtgcgcccagttcggggtccatcggctccatgcgataggactcgggggtccgtagcttccagaggttgattccttctgctccggggcggtccatgagggcccagtcgcggtcgattctggtggcgatgatgtgggttaattcgcgccatgcccagcgggcctggattggggtgagggtctggccagggaaccattcatcagcgaccagaatgtcgaggttgcggtcggtttctttgtgggtgaaccggcctcgggcgggccgcccggacagcatgaacaggccccgcacgtgccagtcctggttgaactcgcgggtgtgagcgggggtgtcaggcagcagccaggattgaggctggtcggggatgttaccgcagacgatcaggcgtcgggcgttgtggtgtagcgcggttgttagcaggtctgacagggtcgcgtgcttggtgcgtcgtccccccagcactggcaggatctcgtttccggccgcgtcgactccccgggcggtgtcgatgtctagccacactgtttcggggtcggggggccgatgtggggcgggacggcgctgctcctggtcgtctctcatggtttcctcctttgggccagggagcggccggcgtcgagggcgttcatgcgctcgcgttgttcttcgcgtagttggtagacccggcctcgtgacactcctgctgcctcggcgatggtggtggccggcaggtggccgatggcggcagcgtcggcaaggacgtcacgccaggccaggtcaatggttcccagctgggctagagcttcgtcgcggcggcgggtggcatcagccactacggaggcccaccctgtggggtggatggtcttgacgacgattcggttgtggcggatggggccccatgcatcagcggggacttgccagccgtgattggcggcggactcggtgatcttgaggcgtcgctcaggtgcgcgggtgcgggcagtgacgtcggtgttccaggtctggactggtacccacgtcccctctcggatgcgttcgatgacgcacgtggtgacctcgtcggtgactgtgatgaccagacgataatctttcccgtctggggtggttcg

SEQ ID NO: 325 - DNA, 1890 bp, Propionibacterium acnes
  source 1..1890: mol_type = genomic DNA
ccacccctgccgggttcgacttcgacgctctggccgagtgggccgagagcgatgaggcgacccacaccccgcaaaccagccccgtgttccggggcaaggacgccgcgcgcgccagccgcgcattcctcggccgaggacggcccaccctcggcgcggaccacgccaccggcgagggccggtcgccccgccgtcaggtacggctcgacgcacgcaccaacgcgcgactcgacgcctacgcagccgcaaccggcaccagcgcctcccagatcatccgcgacgccctcgctgactacctgcccgcctgatcccaccccaatccactcgggcgcctgtcagtgccccctcttctgggtggtggtccggggcgtcaccgccccggaccagttgggtagtcatctcagttgaaataagcgattagtgatacgcccctcctgctttccggtgctgtcatgagcgtctgacaacagcgacacctcggggcagccgacggacagtcctctggctgccgctctgatcccatgcccacggcacgaaggtgtcggacagctcggtctcatcatgtgcccaaatagcgtcgtgggcctgtcgccaagcttctcgggagccccacacgggcacgaccgggccacaccggtgtcctggtctccagtgtcgcgacactgtcgatttcggtacgtgcaatgcggcggcggtttgacggatcgacatcccagactcccgcgcgtcccagatcgccatgtggagagtatttgcctccagtgcggccgccacacttgcacgctctcgcgcacgctcgaatgcccgcctagtgctctcaaatgtcgtcacgacgcctccccctgaaaatactcagggtgtcccacggtgggacaccctgagtatttcataccccaactcgcctcaccacacgtcgacctcgacaccgatcaagcgacccgtatcagcgacattgccgtaccgctgccccgcctggtcctccagccacgacaacgcatcccgaaacagcccgacgtcttccaaagctaaaccacagtcgtagccgcccttgtcccccaaccgcaccatctggcgctcccggtggcctccctcgtcgacctcgatccacagtttcgcgtgcatccgctggcctcggccctctgacaggatctcggtgagcaggtcggacgcctgccctcgcgcatcctcgttactgcgggggaattggagtatgtgggaggaacgatgatgggggaggttggtgacctcatggcgcagcaggttgcgcttgtgcatcttccgctcaaggcgctcgggctgacctgttgacggggttgagccgtggcgccgcttcctcggcggggtctcgatccgttgctcttccggcggttcggcgtcaggttgtggtgcgcgatctcccctaggacgggggggatcgccacctatatccgagggacgatgagacggccttccacgcttgctgcgcactttcgcagcccgccccttgcggtcacgtcgacgcggcggcggagtgacgtcctcaccgcgcgctaactgcgtcaacgccgccaccaggttggtgcccggtttcagccctttcagcacgaaccgcaccaggcgggggtctcggccgattcgtcgggcaatctcggcttggctccacccctcggccaacagggtgcgcaacaagtcttgggcccggttatcacgctcagtcactggtcgccccctcggggagtcctacttgctcggcctgctctgatagagcagcccgctccgatccggtctgaggcgcttccaaagggcccggcaagacacctttgacacgcagccgcccgtccttgccgtcatcgccgcccccctgggccacagggagcgcccaggggggcacgttgctggtgtagatggcgtcgc

SEQ ID NO: 326 - DNA, 1795 bp, Propionibacterium acnes
  source 1..1795: mol_type = genomic DNA
gacgccggccaccccaactactccgacccacacggtgaccccagctccggcctctgccggccactcgaccagcgacgagcacccaatccatacggataccgccacagcggacaaggccagcgacgaggacgccctgtccccaatccaggtgggcttgaccgccagcgtcggactggtgctggtcgccggactgatcaccaccctcaaccgccgctaccggacccggttcacccgccagccccgcggcaaggccatgaccctgcccagcccggacgcccaaactgccgagatagcgctgcgcagcaccggggcgactgacactctgacgatcacctgcctcgaccaggcgctccgcgcgatcggcgcatggtgccaccactgcgggcacccgctgccacccctgctggccgcccgcgtcgatgacgaccggatcgacctgctgctatcccaggcggcccccgaccatcccgaggcggtggagctggccgccgacggatcggtgtggaccctcaccgccgaccggatcgacgacctgctagcccacaccgatgacaaccaagcggctccgtggccgtctctggtcacactgggacgcgacgacgacgacgcccacatcctcatcgacttggaagccgcaggaaccttgcacctgatcgccgatgacgaccaggtcgacgcggccctcgccgcgatcgccgtggaactggccacctgtgactggtccgacgaggtcaacgtcaccctggtcggccaggtgtgcccgggcctagaagacgcactagagtctccgaccctgacccgcgccaccgacgtggacgccctcctcacccccctggaagctcgcgccgacgaccagcgacacatcctcaccgaaggaagccccctcgccgctcaccgagccgaccccgccatctccgacgggttcgacgccgaagtgatcctcctcgacaccgaactcaccgaagaccaccgcaaccgcctcgccagcctcgtcgaggctcttccccgcgtgtcagtcgccgcggtaacaaccagccccaccagcccagacgaatggtccctcaccctgacaggtgacccactagccgccgacgtggctcccctcggctggcacatccacccccaaaccctctcccccgacctgtacaaccgcatggttgaactactcgccaactccgccgccgcagactacgaacccgccagctggtggaaccacgacgccgacgacgagcccaccaccgaccccaccaacgaggaagaatctaccccgagcaggcgagcccgcccgaatatccgcctgaccaccctgaccggcggcatcgacctatccagcgtcgacatcgacgacatcatcgacgaagccaaccaggccctcgacaacaccgaccaggccaccaaccaggttcgtgtcgacaccgaccaacccggcaccgacacccccttccccatcgacgacatcgacccgctgagctccgaccatccggtcctatccatcatcggccaccccgacatcacaggtgccactggaaccgttgggcgctccccgtggcgctgccaacagttggccctctacatcgctgagcatccgggggtatcgggggcgactatcgccgatgatttggggctatcagcgtcgacggtgcgctcgattgctacacacctgcgacactggttgggagccgacgatgccggggtggcttacatgccggcggcgacgcgcggctaccggctcgatgagcggatcgtcacagatgtggacctgatcgacgctgctgtggccggggcaggcattaac

SEQ ID NO: 327 - DNA, 850 bp, Propionibacterium acnes
  source 1..850: mol_type = genomic DNA
gacagtgatacgtcgtatcggtgccctggtggcactgctggtggtgatagccggcttacccgccgggctcgtggccgcaggcgccccgctagtaccctcgggcctgtcatgggcccatgtgcggcatctgttggttaccccagacatgaccgggtcggtgctggtgtggctggtcagcctcatcggctggatcgggtgggcatggttcgccctggccgtcgcagccgaagcggtgacgatgctctcagggcagcggctgcactggcacatgcccggccctcgcctagtgcgccgagtggcagccggtctcctcattgccgcgttcgcggccgcaccggcagccacaagcacggctcacgccgccgaggccacccatgtggcggtcgccgcccaggctggaccggcacacgcggccggcacccaggacagccccgccaccacctctcaggccccggacgcctccaccactccgaaaatctggaagacctacacggtgcgggccaacgactacctgtggaagatcgccgagcactactacggtgacggcgcccaattccgtcgtatcgccgaagcctccggtatcgacccgcactcagagctgaaagccggccagaaactgatcctgccggttcctaagaacacggccgcagtccactcggttaaagcgggggagtatctgtggaagatcgccgagcactactacggtgacggcgcccagtaccataaaatcgctgaagcttccggtatcgatgcccattccgatctagccgtgggccaaaaactcgtcatccccgggcccctccgccacgacgccacgccgccacaccactcggcgtcgacccacgcgaag

SEQ ID NO: 328 - DNA, 1845 bp, Propionibacterium acnes
  source 1..1845: mol_type = genomic DNA
attcttgtttggcggtcatgatagcgatgaccgctgcctgggtaggcagtttgtcacgctggaccacagtgacgatggtggtcacgagctgcttctgtctggcggtgaggcctccggcgccgaccccgccgccggtgacagttcccatgcaggcatccccgccagcgcctccaccagagttatcgtcgagggccccagagcctactgacagcagcggcacaatgatcacggtcgctggcaagaccgccaggcccgccagcatcagcactgctgcactcaccacggcgatcacgtgagatgctttcaacgctgcccacctctcgctggtttgagggggcgacgcctgctggtacgcacaggcttggttgatccagtccgccgttgattggcaggcctgggtttgatcggcttgctgggacccggtttgggctccggagtcttaggctccggcttcacatgcctaggcacttcggctgcggtgggaggagtcagcacgtggcgtaccggcttggtgaccttctgggcacccgaaacaaccggcttagacaccaccttggcacctttgaccaccggtgcggctgccttcgcgccggccttcttgactgcacgatgcgctttgatagccccggcctcggcccggccaaccctactagcagtagcatcgagggctctgtggcccgtcgttgccctcaccggtgcatccttgccctggcgggtctgcttagcgatcgccgacataccgccccgcaatgccgaaacatgattgtgggcgtgggcgatcgccgacatgccggccgtcgcgatttttgactggccctgcggggcccctgccccagcacgaatctgccggtaagccgccgacgtgccacgagcacccgccgccattcgcgccaccttcgcagccctagtcactcccgtcgacacgccacccgtggctaccgcagcagcacccgagaccacagtcgaggccatccgccttcgacccaatccggtgagcttgcgaccaccgctgcgcaccatccggcgagcaccccgcccagcccactggccgatcaccgagcccctttcggaacgcttgctgcgcatccaatcgttgatcttgtccctcagccccttctcgcccttgtgacgacgccacatggacatcaagaacccgataatccccacgagctcgagcatgttgacaaccatgaccttgatggcgacatcaccgtcagaggcgaaaaccgacttgatgatgagcatgaccacacccaacatcaccatcgacccgacaatgccgatcatcgagtacaagatcgaacacagatcccggatgagcggatctgtgcggccagggatagcccgcaacacgttgagcatcgacatgaacgccgaccacaccaacttgcacacgtagaaccagcacatgcccgcgaacaccagcaggaccacagccaaacccgccaccgttgacgagtaaaagaagaaccccaccaaccacgaaccatccgcaatatcgccggcgtaatccgacaacccctcatcacagtcaccaaggtcgtcgcgagcatccgagacgtcatcgtaagggccacccttgagcacctcgatgtacttgtcgtggcacttcgcatcaataatgcggccatagttgagctgctgatgaaccggcgccacgaacgagtccacaatgatcgccgacagcttcggatccttcgagtctcccgtcgaggtcatgtcatcaggaatctcgacctcaccagcggtcgccgtcgcaggatcaaccgaactggtaatcatatgagacagcgccacaccgaactgctgggtgcgagccagcggagtagccaacgtcgtcgtatc

SEQ ID NO: 329 - DNA, 1875 bp, Propionibacterium acnes
  source 1..1875: mol_type = genomic DNA
ttgatgagcaccccagcggccagctctgtggcagcaaccgggtgggctgggctgtagaggaggtcgatgtcgcgggcagggtcgtcgggttcttcggttacctcgggtggggtcgatctggctgtctcggtgtcgtcggccaggtcggctcccaggatgcgttcccattcggggctggttttcttgcccgctgaggccatcgtctcgtcgatctgttcgtcagtgggccacacaaatttctttttggtccaggtcgtggtgtcgggtcgcagctgatccagcagttccaggtcttgcggggagtgggccttgcgggggtcgggggtgtagaagaattggacttccttgggggctgattcgccggataggtaggtgccgcggccgcgtttgccgaacgggattcccacgccgacgtgttcggagccgaacatcatgcgggctccgtcagcggacaggggtccggtggcggcacgcccggagaagttgtctcggatttcgccgcccaggaactcggcgtcggggcgttgggtccccagatcgacgtggatacggcaggcggctgccatgcgcagcagggagccgatccagccgaaaacggggcattctccgggcatcccagagaccttgatcgttgaccaccagtttttcgcgttgccgtagaactggcggtactcgtcgatgaggaccagcacgcgggtgaagtcggtctcgcgggccccttcttcttcgatgcggcggtagcggtcctccatgagagaccacagccagtggatgagggcgacctggtcggggacggtagtggcgaccatctcgatgttgggccactcccgcaggcccaggtactcgatgcgtttagggtcgatgacgaagacgcgccagttgcggcgggcaccctcgacggcgtcgccgatcatggacaccgtttttccggtacgggtgcggccggccttgagctggtgggccatgacaccggagatgtcccagaaacaggtgttgccgtcctcgtcgacggcctgggggattttctcccagtctggggagtctgggcccggaagggccacgggtcggggcaccatcgagggcagggggtggcggcgggtgacggtgatggtgtcgtgttccaggtcgaagtcgctgcgccactggccgagcatcatcgccgaggtcaccgcggccaggcgcaattggatgttcgggctggacaaatgggcgccacgttggtggtgaatggtgaagccgtccaggttcccccgatcggttttccaggaatcgacggtgaccgccgacccatagatctgagtggctacttctttagcccgttccttgtctcggtccagatcggttttgtcagggtcaggggtcggggcgcggtattgcaggacgaaccggccggccgggatcgttgcggatgtcaccgtgaactctgccggcgaccaggcagccgcggccgcctgggtgagggccattggcatggtctcgacggcagcctcctcgggggggatggtgagggtcaggcgtcgcggatgcgtcttcttgcgattccatgtgactttctgcctcaccggcaccttcgccgccgactgaatggctaggcgagctgattcggcagtttcggtacgccggccagcgcgtagcgcccgtcgtgcgtgaaggctgcccaccacagcacagcccatacacggcagccaccagcgcggatcagcggctgctgcatagcccccggtagctagtaccgcacctgaccagccggccgcgatacttttccacgccggtttcgcaccaacagtcggggcagacgctggccgcttcgagaccgaggagggacgagacaagggagtgctggtcatgccgcggcctccttgtggcaggtcattt

SEQ ID NO: 330 - DNA, 1794 bp, Propionibacterium acnes
  source 1..1794: mol_type = genomic DNA
agaagacgcactagagtctccgaccctgacccgcgccaccgacgtggacaccctcctcaccaccctagaagctcgcgccgacgaccagcgacacatcctcaccgaaggaaaccccctcgccgctcaccgagccgaccccgccatctccgacgggttcgacgccgaagtgatcctcctcgacaccgaactcaccgaagaccaccgcaaccgcctcgccagcctcgtcgaggctcttccccgcgtgtcagtcgccgcggtaacaaccagccccaccagctcagacgaatggtccctcaccctgacaggtgacccactagccgccgacctggctcccctcggctggcacatccacccccaaaccctctcccccgacctgtacaaccgcatggttgaactactcgccaactccgccgccgcagactacgaacccgccagctggtggaaccacgacgccgacgacgagcccaccaccgaccccaccaacgaggaagaatctaccccgagcaggcgagcccgcccgaatatccgcctgaccaccctgaccggcggcatcgacctatccagcgtcgacatcgacgacatcatcgacgaagccaaccaggccctcgacaacaccgaccagaccaccaaccaggttcgcgtcgacaccaaccaacccggcaccgacacccccttccccatcgacgacatcgacccgctgagctccgaccatccggtcctatccatcatcggccaccccgacatcacaggtgccactggaaccgttgggcgctccccgtggcgctgccaacagttggctctctacatcgctgagcatccgggagcatcgggggcgactatcgccgatgatttggggctatcagcgtcgacggtgcgctcgattgctacacacctgcgacactggttgggagccgacgatgccggggtggcttacatgccggcggcgacgcgcggctaccggctcgatgagcggatcgtcacagatgtggacctgatcgacgctgctgtggccggggcaggcattaacaccgctgagacggccacactggtggccattttgaagctgggccgcggacgggtcttcgctggggttcctgactcggaacttcgccagttcagggcgtcgatgtaccacgtggaggcccgcatcgtcgatgctgccctccaagtgacagaccgggccctggaagccggggacctggggctggcccggtgggcgttgacccaagggctactggtgtctcccgatcatgaggacctggtcaccggttgtctgcgcaccgagtaccaggccggcaacatggacaaggtttccgagctggtcgatcacctgtcggctaccgcacgacgcctgggcgtcgatttgagcgccgacaccacccggatcatcgactccgttattacccatacacgcaggagagcatcatgatctcccgttgcactcatctccgtcaggaaggttcctatgcaccattatcgtcttggtatcggcactgccctcatcgcggtagcagccgtggccggctgtcgctcaacagactcgacacccacaccacctccatcccgtgtctccgccacgacatcagcgagctctaccctcagcccgaccccgtcagccggagcggtcagtgccgccgacgccgaaaaggtctaccgcaccttgcacaccaacgtgttcgcattggagaagaagggtggcctggtacccggggaacccgcacccgcatccctctcggactacgccagcggccaagcactcaagaactacatgaccttcaaccaccaaatctcggg

SEQ ID NO: 331 - DNA, 1064 bp, Propionibacterium acnes
  source 1..1064: mol_type = genomic DNA
caccaacacatccaaaaccatcctcacgctcacccgcacagccaccatctcccacctgctagccatcctcgatggcctaccccaagctgaggggactcactggctcaacactcaacccgacctccaccacatcaccctcgacgactccaccaccggctgggccaccaaccgcaccgacgacaccgacaccggcgtctgctacgacaccagcacccacaactggcagatctgctgacagcatgacgggcctgcccttgaggggttggactctgcacccatttcagccgggtacgttgccggctgggcgaaggaagcagacggcgccgcgattgaagctgccgccgagcacgtcgcgaagacctcccacgcgattgccgaggcgttgcagctcaccgcacagtgagccccacggggcgaccggctcaccccggtcgcccctcaccccccgacaggggaaccgttcccgccgcctgaatctccatacccctgatacgtactacgcggggtcgaggagtggactcccccgccctgagcagtacactgtactacacagtcattgaggatagaggtgacgtcatgagtttttcgatccgtttacccgaccatgagcgccgcttagcggactcctacgcccgcctacactcacaatccctgagcgaggctttcaagcaagccctcttcgaccgcatcgccgacgagttcgaccttcagatagcacacgaagctctcaccgactacgccaacgacaactaccagtctcgtcccatcagcgagctatgggacgagtgtgacctatgagctggcagatcgaaaccactagccggttcgataaagaattcaaaaagctggaccgctacacccaaaaactcattcacggctggatcacgaaaaacatcgacaacaccgacgatccccgccgccacggcaagcccctcaccggtgatctttctggactgtggcgctaccggatcggtgattatcgcctcatatgcacactcaacgatgaccgcctcatcatccttgccctgtccatcggtcaccgccgcgacatctaccgctaagcc

SEQ ID NO: 332 - DNA, 1639 bp, Propionibacterium acnes
  source 1..1639: mol_type = genomic DNA
gagccagttatcctcatctacgacgatggctatgaactcctgatccacgccatgaaagcccgccctcagtatctgagctacttcgctatctagtgttgttgggcgagttgaactcaacttttctccgacgcaagcgccaataaaaggctgatccatccgaataccaccaaacacggctgaagtgtggaacagattcagcaagacagggtgcggtgctcgggtgcgttggggagatgaggatattcaggcttctggcgggatgtggcttgatgacgtccaggatcaccggttcggttttgaaggtgccttgcattaatgtcgacagggtcgtacgactcgaggactggatcgaccagcccgttgcgtctgaagaacttcatccaccccggtggagctccggccgcgtactggtgcaacggatcattagcatgggtagcgtgagtatgccttcgatcgtggtcagtgctgtcatcatccaagattctgacgggcggcttctcactgtccgtaaacgaggcgccgaggcattcatgctgccaggcggcaagccggagcccggcgaggactcgcgtcaggcagtagtccgggaagtgcacgaagagctcggcgtcgcattgtcttccgacgacctgcgtcgggtgggagtgttcaccacgcgagcagcgaatgaggccggccatcaggtggtggcgacgattttcacccacaccccggttgcggtgagtgagccagctgctgagatcgagcagattcgttggctcgattggagtgtcgacgccctgcctgatgacctggccccgctgctggtcgaggcagtcatcccgtggctgcggcgccgtatccggtcggtcgctgtattcacgggtgcgaaggatggaaccgaccctcattatcgtgtcgaagcaaccgccttgggccggggtctcgcacacgccgggatcaccctggtttatggcggcgggaaggtcgggatgatgggtgctgttgctgatgcggccctcgctgctggcggcgctgtgatcggagtgatgccgcagcacttggtggacggggagatcgcccatcctagtctgactcacctcgaggtagtgcggactatgcatgagcgcaagcagcggatgagtgacctagctgacgcgttcgtcgcgctacccggcggcggcggaacccttgacgagctattcgaagcatggacatggcagcagctcggtgtacacagcaaacccgtggccttgtacgactcgaccttctgggcaccgctgaccgcgctactcaaccacatgaccatcgaaggcttcatccgccctgaggaccgcgcctcgctcgtgatcgccgataccatacatcagctgatggccgatcttgagggatggaccccaccaccaccgaagtggcgctcgtgacatagaacaaatgattctgactatggctcattgacatctgcgcagcggctactagctccatcgacttcaaatcgggccttggccgaggctcggttcaggtggcccggaatggatccccacaaattgaatgctcatgatcgaggtgatgaacgcccactctattgtcctacgcccggttgtatccagcgagcaattgaaggtgctgcgcctgttggtcgaccaggccgagccactca

SEQ ID NO: 333 - DNA, 1200 bp, Propionibacterium acnes
  source 1..1200: mol_type = genomic DNA
ccggagtatctggacaaggccgtgctcactgcgttgtatcccgatgggttgcccttcgacgaggacaccgaggagccgggcgagaatgccgggcaggaggagcttgcgatgactggatgagcccgaacatggttgaaggccgccccgccaggcgaccttcaatcaatggtttcggttgtcagctgcagccacccttgccaggtgctgtggttcttctccagaggaggagggaccgccatgaagacccagaagatctagaagatccaaaagaaccggtttcggctgttgcttcggtcttcatggtagctgatagcccgcgtcgttggaagtgcgacgacgccgatcctcatcggtatcgcaccctgttccagggtcgagaatgtgaaggattaacaaccatgacaagtcatgagacgccctccctgagggcgtcatgaccgctttaattcaagctctgccgacagctgaactgtctgctggacctggtgctagcagtccagctagaccctctgctgagggcttcatcaagattcatcacgaccttattagtgcgggcgtgtcgggtaacgcgatggcgttgttcgtcgcgttacgtaaccagcccggctgtgatcagtggacccgtcactcgtacctgcggctagcccaatggtgcggctgggatgggctgtcggaggcggcgggctgtaagcgggtgcagcgggccgctgctgagctcgctagcggtggttggctggaatcgcgggtcggccatgatcgtcgcaccgctaagacgctggtgtggcatcggttgaccagccccgacaccgaccgctgggagcaattgccgcggattgtgtgggcgaggatctgccagatcgccggggagacgtcgggagagtgggtgaggcattggctggtgtggcggatgctggccggtcgtactggtgtggctcaggcccctatgtccatcgtggctcggttcctgggctgttcttcgcgccaggtctctcatatccgtggggctctcgttgatgccggtctgctcggctgtgacgaggtctcgggggcggcgagccgggtgtggttcccctcgatggccgaggagtgtgcagcggatcgtgaggtggtcgatggggccgtcgtcgatgctggggtgggctctggtgaaggtgtcgaggagggcggggaacccctgtcgattttgtccacccacccctg

SEQ ID NO: 334 - DNA, 1639 bp, Propionibacterium acnes; identical to SEQ ID NO: 332
  source 1..1639: mol_type = genomic DNA

SEQ ID NO: 335 - DNA, 1202 bp, Propionibacterium acnes
  source 1..1202: mol_type = genomic DNA
ccggagtatctggacaaggccgtgctcactgcgttgtatcccgatgggttgcccttcgacgaggacaccgaggagccgggcgagaatgccgggcaggaggagcttgcgatgactggatgagcccgaacatggttgaaggccgccccgccaggcgaccttcaatcaatggtttcggttgtcagctgcagccacccttgccaggtgctgtggttcttctccagaggaggagggaccgccatgaagacccagaagatctagaagatccaaaagaaccggtttcggctgttgcttcggtcttcatggtagctgatagcccgcgtcgttggaagtgcgacgacgccgatcctcatcggtatcgcaccctgttccagggtcgagaatgtgaaggattaacaaccatgacaagtcatgagacgccctccctgagggcgtcatgaccgctttaattcaagctctgccgacagctgaactgtctgctggacctggtgctagcagtccagctagaccctctgctgagggcttcatcaagattcatcacgaccttattagtgcgggcgtgtcgggtaacgcgatggcgttgttcgtcgcgttacgtaaccagcccggctgtgatcagtggacccgtcactcgtacctgcggctagcccaatggtgcggctgggatgggctgtcggaggcggcgggctgtaagcgggtgcagcgggccgctgctgagctcgctagcggtggttggctggaatcgcgggtcggccatgatcgtcgcaccgctaagacgctggtgtggcatcggttgaccagccccgacaccgaccgctgggagcaattgccgcggattgtgtgggcgaggatctgccagatcgccggggagacgtcgggagagtgggtgaggcattggctggtgtggcggatgctggccggtcgtactggtgtggctcaggcccctatgtccatcgtggctcggttcctgggctgttcttcgcgccaggtctctcatatccgtggggctctcgttgatgccggtctgctcggctgtgacgaggtctcgggggcggcgagccgggtgtggttcccctcgatggccgaggagtgtgcagcggatcgtgaggtggtcgatggggccgtcgtcgatgctggggtgggctctggtgaaggtgtcgaggagggcggggaacccctgtcgattttgtccacccacccctgtc

SEQ ID NO: 336 - DNA, 1641 bp, Propionibacterium acnes
  source 1..1641: mol_type = genomic DNA
tattcgtccagatccgtcaagtcctcaaccgtgcctccctggaaaacgtcgacccgtggaacgggctagaccggctagccgaggacatcaaactgcccgaactcaccgatgtggtctccatcgcccgcctccaaaacgaaggcgcctccctcgtcgacagtttccgggcccgagtcgccgagttacgcgacgcctacctgctgcgcctgcaacaagaatccaccgccatcacccagcggcttggtttgtggacgatcctgcaagccggctcggtcatgctcatcttgctgggggcggccgccctcacactcatcacagccggataaaccgacaccgtgtcgagcccccatatgggccgcgaacctttcataatgatgcctgtaagcaccacaatattgatcacaacctaacaatgaaggagaaatcatgatgaccgatctcgacctggctaaaaaacagatcacctggctggcggcgcacctgagttcccggatcgttgacgagcgtggcggtggtagctctaccgtggagacactgatttggattggtgtcatcgtggcgctggtgattggtgtgggcgtcggggtgacggcctatatcaggtcgaagatgcctcactgacgacgatgcgtagcaggttcacaactgatcagcgtggcggtggtagcgcgtcggtggggatgctcctgctgatgcctgcgatcatgctgctggcattcggtgggatcgaggtcgggatgtggtgtcacgcccatcagtcgaccatcgcggcagcccaaagcgccgcggaagctcagcgtgtcgtccatccggtcccggggtcggcacaggaggcagcctcgcagatcactagtcatggcggggtgcgtgatacccggatatcggtcagtgatgacggggccactgtcacggtgaccgtctcaggtcgggccccatcgatgctggggctgcatcttccggctgtgtcgtcgacagcgtcgatgcccaaggagcgcctgtcgtgaggcgaagtgagcgcggcggagcaagtctaagcgtcgaggtgctcatgtgggcgccgatcgcgctggtgatcatcgggtttgttgtgggtatcggccggatgtcgatggcccaggacgcggtgagtggcgcggctggtgctgcggcccgtgcggcgtcgttggagcgtgatggacagtcggctcagtctgcggcgcagcaggcggcgtcggcgaacctgtcgtccggtgggctggcatgtgcgccgagtgtgagcgtggacacgtcagtgtttgcccgtcctgccgggcaggcgggcacggttcacgccacggtcacgtgtgtcacctcgctgggtcttggattcgggtcccggacggtgcacgcaacggggtctgccccggtagacacctatcgggaaaggagaggctgagatggcccgcgatgagcgtggtggcggctcggtgtcggtgtggatgctgctcatggtgccagtaattctggtcatggccggcctggtttttgacgggtcccgtcagatatcggcaacccaggcggcccaggacgcggcggttgcggcatcccgcgccggaactgatgcggcagcgacaccgcagctagctggccacgacggggcggccgtagcagtccaagcggccc

SEQ ID NO: 337 - DNA, 1630 bp, Propionibacterium acnes
  source 1..1630: mol_type = genomic DNA
tctgcccagcgtttctcggcgatgtcgatcatgtcttggatggttttgacccatcctcggatgggatcgactttggtcagtttgatcccttcgaggaactcgatgggctgggtgatgggcccatctggtccggcttcggtgtcccagccttcgtcgatggctagtttcagttcggcggtatcgacccatgtttcgtgggtggtgccgggcacgttgggccaaaaccatcctgctcgtcctttggtgcgtttgaccggtagtaggccgatgtcgtcccaccaggatggcacggtgaagcggatgtggtagcgggccgggtgccaggggttgttggtgaacaggtcgcgggcttcggtggcgctgagcagagtggcgggtgcggcaccgatctctccggtcactgatccggcatacatgaatcggccgtcgatgtacacgaagttagggatagggccggcaggcacggtggggcgccagcccttttcgcggtcctcggggttgccgtcgtcgacgcatagttcgtagcggtgctgaggggaggtgtgttggatgagtgcgcccagttcggggtccatcggctccatgcgataggactcgggggtccgtagcttccagaggttgattccttctgctccggggcggtccatgagggcccagtcgcggtcgattctggtggcgatgatgtgggttaattcgcgccatgcccagcgggcctggattggggtgagggtctggccagggaaccattcatcagcgaccagaatgtcgaggttgcggtcggtttctttgtgggtgaaccggcctcgggcgggccgcccggacagcatgaacaggccccgcacgtgccagtcctggttgaactcgcgggtgtgagcgggggtgtcaggcagcagccaggattgaggctggtcggggatgttaccgcagacgatcaggcgtcgggcgttgtggtgtagcgcggttgttagcaggtctgacagggtcgcgtgcttggtgcgtcgtccccccagcactggcaggatctcgtttccggccgcgtcgactccccgggcggtgtcgatgtctagccacactgtttcggggtcggggggccgatgtggggcgggacggcgctgctcctggtcgtctctcatggtttcctcctttgggccagggagcggccggcgtcgagggcgttcatgcgctcgcgttgttcttcgcgtagttggtagacccggcctcgtgacactcctgctgcctcggcgatggtggtggccggcaggtggccgatggcggcagcgtcggcaaggacgtcacgccaggccaggtcaatggttcccagctgggctagagcttcgtcgcggcggcgggtggcatcagccactacggaggcccaccctgtggggtggatggtcttgacgacgattcggttgtggcggatggggccccatgcatcagcggggacttgccagccgtgattggcggcggactcggtgatcttgaggcgtcgctcaggtgcgcgggtgcgggcagtgacgtcggtgttccaggtctggactggtacccacgtcccctctcggatgcgttcgatgacgcacgtggtgacctcgtcggtgactgtgatgaccagacgataatctttcccgtctgg

SEQ ID NO: 338 - DNA, 1643 bp, Propionibacterium acnes
  source 1..1643: mol_type = genomic DNA
gcgagccacgaccatcgccaagctgaatggagagcgagcatgagcaccacccctgccgggttcgacttcgacgctctggccgagtgggccgagagcgatgaggcgacccacaccccgcaaaccagccccgtgttccggggcaaggacgccgcgcgcgccagccgcgcattcctcggccgaggacggcccaccctcggcgcggaccacgccaccggcgagggccggtcgccccgccgtcaagtacggctcgacgcacgcaccaacgcgcgactcgacgcctacgcagccgcaaccggcaccagcgcctcccagatcatccgcgacgccctcgctgactacctgcccgcctgatcccaccccaatccactcgggcgcctgtcagtgccccctcttctgggtggtggtccggggcgtcaccgccccggaccagttgggtagtcatctcagttgaaataagcgattagtgatacgcccctcctgctttccggtgctgtcatgagcgtctgacaacagcgacacctcggggcagccgacggacagtcctctggctgccgctctgatcccatgcccacggcacgaaggtgtcggacagctcggtctcatcatgtgcccaaatagcgtcgtgggcctgtcgccaagcttctcgggagccccacacgggcacgaccgggccacaccggtgtcctggtctccagtgtcgcgacactgtcgatttcggtacgtgcaatgcggcggcggtttgacggatcgacatcccagactcccgcgcgtcccagatcgccatgtggagagtatttgcctccagtgcggccgccacacttgcacgctctcgcgcacgctcgaatgcccgcctagtgctctcaaatgtcgtcacgacgcctccccctgaaaatactcagggtgtcccacggtgggacaccctgagtatttcataccccaactcgcctcaccacacgtcgacctcgacaccgatcaagcgacccgtatcagcgacattgccgtaccgctgacccgcctggtcctccagccacgacaacgcatcccgaaacagcccgacgtcttccaaagctaaaccacagtcgtagccgcccttgtcccccaaccgcaccatctggcgctcccggtggcctccctcgtcgacctcgatccacagtttcgcgtgcatccgctggcctcggccctctgacaggatctcggtgagcaggtcggacgcctgccctcgcgcatcctcgttactgcgggggaattggagtatgtgggaggaacgatgatgggggaggttggtgacctcatggcgcagcaggttgcgcttgtgcatctgctggtcgagacggtcgggctgacctgttgacggggttgagccgtggcgccgcttcctcggcggggtctcgatccgttgctcttccggcggttcggcgtcaggttgtggtgcgcgatctcccctaggacgggggggcttgccacctatatccgagggacgatgagacggccttccacgcttgctgcgcactttcgcagcccgccccttgcggtcacgccgacgcggcggcggagtgacgtcctcaccgcgcgctaactgcgtcaacgcctcgaccaggttggtgcccggtttcagcccttttagcacgaaccgcaccaggcgg

SEQ ID NO: 339 - DNA, 1583 bp, Propionibacterium acnes
  source 1..1583: mol_type = genomic DNA
gaacggggcatgggattagccgaggcgctgcgcgaggggacggcccttcccccaccacagcatctcagcgaaaacctccacctggtcagtggcggcccggccctccacgagttcaccgaccccgcatccttagcggccatcatcgaccgagtcaccaccgcacgctacgacctgctagctcaggcccttgccccgctggcctgggactatgacctcatcttcatcgactccgggcctgcccaaactctgctgtcccagaccatccttggagtagcccgctggctggtagtgcccacccgcaccgataacgcctcaatcactggcctcgtcgacgttcaagacgccatcgacggggttgcctcctgcaaccctgaccttcaactactcggcgttgtcctagccggcgtgggggcccgggccacccggatcgccgcagataaacgccacgccatcgacacagtgctgggggcaggaaccgttttcgatgcggtcatccactactccgagaaggtgtccgtgctcgcacgccagcagggcaagaccgtcgccgagctagccaacgagtaccacaacacccagcccgcctacacctacctagctaaaggccagaacatccccaacgtcgccaaggcagccgtcagcatcgaaactgattatctgaggctggccaccgagatcagcgaccgcatgttcaccagcgacgagcaggagcctgatcatgactgacgatccgactccatccgagcagaacaaccccaccagcgacgacatgcgcttggccgaagaatgggccaacagcggccgcacagtgggagccctgccgcgccgtcaacggcctcagcaacccacaccccgcaccaccagccaaccccctgtctcgtcccctgacacaccggctccgaaaaaaccccagaagacccccaccagccagcctggccgtcaacggatcaacgtcaccgtctacgttgtgcccgaactccatgagcggctgcgctcccgatcggcggcgacgggggtgacggtctcggatctggtggtgcatgcgttagcgttcgtcgccgatcatgcgggggaggcgatcgccgatgatctgcgcgtcgagacgggccccggcatgggggccggactgttcgatgtgaccccatcgcggccagtaggggtcgccaaaacccagctgggggtgcgaatgacccgccacaacaagaatggcttggaccagctgacccggacgagtggagcccgtgaccgcagccatcttgtgtctgtcgccgtgcgcgactatctcgactccaaccctgtaaagaaaggccgacatgtccgctgatgaaactcctgccgcccggggtgggcgacgctttgatacgaccgtcaagcccaggcgccgtcccatgcttatcgccgccggtatcgccatcgtgatagtcggcgcgctcctcatcactcagttgattcgctccgcccaaaccgagcatcgcgtgctggaagtccacgccgatgtggctcgcggcgaggtcatccgtgacaccgatctggtatcggtgactgtcggccaggtcgacaacgtatcaacggttcccgcagac

SEQ ID NO: 340 - DNA, 1551 bp, Propionibacterium acnes
  source 1..1551: mol_type = genomic DNA
gctgagaaaaattttgggtccgccctgcatatcggggcctcttcataccttcaaaagtgtgaagggaatacagactcttcgactggaattaaaatggtatatggcgtgtccggtccgcacccagctccacgatgcgccatagaggagccataacttcaccaatcgtatacgatatgagtgtaggtgagcatctaccggtggccgacagtcagatacaagcatgggcggatgaagcagaagctgattatgacctcagcatgcttccgccgtctcgacgtggtcgcccaccggtggggaggggcccgggcactgtggtccctgtgcgcttcgacgcggacactctcaaggcgttgtcacaacgagcccctgacgaaggattgaccacgcgttctgacgcgatccgtgctgcggttaaccagtggctcggcctcggctcgtaaacattatcggcgcgacaaccttactgatgacgctgttggttacgccgtagagcacatcttgtactcgtgggcgctcgacgatgccgatgatcctcgttgctggatgatgattcggtgttgacccagctggcctcctcatggagctagttatcctcatctacgacgatggctatgaactcctgatccacgccatgaaagcccgccctcagtatctgagctacttcgctatctagtgttgttgggcgagttgaactcaacttttctccgacgcaagcgccaataaaaggctgatccatccgaataccaccaaacacggctgaagtgtggaacagattcagcaagacagggtgcggtgctcgggtgcgttggggagatgaggatattcaggcttctggcgggatgtggcttgatgacgtccaggatcaccggttcggttttgaaggtgccttgcattaatgtcgacagggtcgtacgactcgaggactggatcgaccagcccgttgcgtctgaagaacttcatccaccccggtggagctccggccgcgtactggtgcaacggatcattagcatgggtagcgtgagtatgccttcgatcgtggtcagtgctgtcatcatccaagattctgacgggcggcttctcactgtccgtaaacgaggcgccgaggcattcatgctgccaggcggcaagccggagcccggcgaggactcgcgtcaggcagtagtccgggaagtgcacgaagagctcggcgtctcattgtcttccgacgacctgcgtcgggtgggagtgttcaccacgcgagcagcgaatgaggccggccatcaggtggtggcgacgattttcacccacaccccggttgcggtgagtgagccagctgctgagatcgagcagattcgttggctcgattggagtgtcgacgccctgcctgatgacctggccccgctgctggtcgaggcagtcatcccgtggctgcggcgccgtatccggtcggtcgctgtattcacgggtgcgaaggatggaaccgaccctcattatcgtgtcgaagcaaccgccttgggccggggtctcgcacacgccgggatcaccctggtttatggcggcgggaaggtcggg

SEQ ID NO: 341 - DNA, 1546 bp, Propionibacterium acnes
  source 1..1546: mol_type = genomic DNA
gctgagaaaaattttgggtccgccctgcatatcggggcctcttcataccttcaaaagtgtgaagggaatacagactcttcgactggaattaaaatggtatatggcgtgtccggtccgcacccagctccacgatgcgccatagaggagccataacttcaccaatcgtatacgatatgagtgtaggtgagcatctaccggtggccgacagtcagatacaagcatgggcggatgaagcagaagctgattatgacctcagcatgcttccgccgtctcgacgtggtcgcccaccggtggggaggggcccgggcactgtggtccctgtgcgcttcgacgcggacactctcaaggcgttgtcacaacgagcccctgacgaaggattgaccacgcgttctgacgcgatccgtgctgcggttaaccagtggctcggcctcggctcgtaaacattatcggcgcgacaaccttactgatgacgctgttggttacgccgtagagcacatcttgtactcgtgggcgctcgacgatgccgatgatcctcgttgctggatgatgattcggtgttgacccagctggcctcctcatggagctagttatcctcatctacgacgatggctatgaactcctgatccacgccatgaaagcccgccctcagtatctgagctacttcgctatctagtgttgttgggcgagttgaactcaacttttctccgacgcaagcgccaataaaaggctgatccatccgaataccaccaaacacggctgaagtgtggaacagattcagcaagacagggtgcggtgctcgggtgcgttggggagatgaggatattcaggcttctggcgggatgtggcttgatgacgtccaggatcaccggttcggttttgaaggtgccttgcattaatgtcgacagggtcgtacgactcgaggactggatcgaccagcccgttgcgtctgaagaacttcatccaccccggtggagctccggccgcgtactggtgcaacggatcattagcatgggtagcgtgagtatgccttcgatcgtggtcagtgctgtcatcatccaagattctgacgggcggcttctcactgtccgtaaacgaggcgccgaggcattcatgctgccaggcggcaagccggagcccggcgaggactcgcgtcaggcagtagtccgggaagtgcacgaagagctcggcgtcgcattgtcttccgacgacctgcgtcgggtgggagtgttcaccacgcgagcagcgaatgaggccggccatcaggtggtggcgacgattttcacccacaccccggttgcggtgagtgagccagctgctgagatcgagcagattcgttggctcgattggagtgtcgacgccctgcctgatgacctggccccgctgctggtcgaggcagtcatcccgtggctgcggcgccgtatccggtcggtcgctgtattcacgggtgcgaaggatggaaccgaccctcattatcgtgtcgaagcaaccgccttgggccggggtctcgcacacgccgggatcaccctggtttatggcggcgggaagg

SEQ ID NO: 342 - DNA, 1496 bp, Propionibacterium acnes
  source 1..1496: mol_type = genomic DNA
gggaatacagactcttcgactggaattaaaatggtatatggcgtgtccggtccgcacccagctccacgatgcgccataggggagccataacttcaccaatcgtatacgatatgagtgtgggtgagcatctaccggtggccgacagtcagatacaagcatgggcggatgaagcagaagctgattatgacctcagcatgcttccgccgtctcgacgtggtcgcccaccggtggggaggggcccgggcactgtggtccctgtgcgcttcgacgcggacactctcaaggcgttgtcacaacgagcccatgacgaaggattgaccacgcgttctgacgcgatccgtgctgcggttaaccagtggctcggcctcggctcgtaaacattatcggcgcgacaaccttactgatgacgctgttggttacgccgtagagcacatcttgtactcgtgggcgctcgacgatgctgatgatcctcgttgctggatgatgattcggtgttgacccagctggcctcctcatggagctagttatcctcatctacgacgatggctatgaactcctgatccacgccatgaaagcccgccctcagtatctgagctacttcgctatctagtgttgttgggcgagttgaactcaacttttctccgacgcaagcgccaataaaaggctgatccatccgaataccaccaaacacggctgaagtgtggaacagattcagcaagacagggtgcggtgctcgggtgcgttggggagatgaggatattcaggcttctggcgggatgtggcttgatgacgtccaggatcaccggttcggttttgaaggtgccttgcattaatgtcgacagggtcgtacgactcgaggactggatcgaccagcccgttgcgtctgaagaacttcatccaccccggtggagctccggccgcgtactggtgcaacggatcattagcatgggtagcgtgagtatgccttcgatcgtggtcagtgctgtcatcatccaagattctgacgggcggcttctcactgtccgtaaacgaggcgccgaggcattcatgctgccaggcggcaagccggagcccggcgagaactcgcgtcaggcagtagtccgggaagtgcacgaagagctcggcgtcgcattgtcttccgacgacctgcgtcgggtgggagtgttcaccacgcgagcagcgaatgaggccggccatcaggtggtggcgacgattttcacccacaccccggttgcggtgagtgagccagctgctgagatcgagcagattcgttggctcgattggagtgtcgacgccctgcctgatgacctggccccgctgctggtcgaggcagtcatcccgtggctgcggcgccgtatccggtcggtcgctgtattcacgggtgcgaaggatggaaccgaccctcattatcgtgtcgaagcaaccgccttgggccggggtctcgcacacgccgggatcaccctggtttatggcggcgggaaggtcgggatgatggg

SEQ ID NO: 343 - DNA, 1526 bp, Propionibacterium acnes
  source 1..1526: mol_type = genomic DNA
cgcacggctgctcgcacccatggcggccgccagatgcgcgccgcctccacccgcgtcctcaccatgtcctgcgcaatcgtttgcgccctaccccgaaggggtcaccactacaggaaagttaagttcctagatggtcaccaacgcacgcgcaggcgcgtgcgaaggccagcaacaccagagaagaaacccctgtggctgcaaaaactcgcagccctcctcgaccagcacctgccctggctggtgagaaaccatcacatcggccgactgtgccacgccctcaccgccctgggcatcgacgaacactggcaacccgcagacctcgacgccctcctcgacgccatgaaccgcaggaaccgtcgcctcggcctcgacgtgccatgcgccgacgaccagcacaaccccttgggactgttcatccaccaggcccgagacaccctcacccacgacaacccccatgaacgccgcctggcccgcgaacaccaccgcgcccaactcatcgacgaccaactccgccgccgcgcagaaaccgccacctgcgcagcccgcctcgcagccgagcacgccgaccccgactaccagacccgccgtcgtgaacgcagggaaaccctgcgagccacactcagggccgcccagcagcatgtcaggacacactgatacccgctcatacacacaccatgaaacacgacaagccacctgacagtatcagctgcaagacgcatgacaacatagaaggatatgatgaaatacacatagacacaacccagcacagcagtttcgcaacaaatcatgatagtctcatggcagtatcgcttgatacacacatagcatcactcccacataggcagttatgctgatatactcctactaggttatccgtccaacatgctgagtgggttcctgtacagcatgaaaggagcatggcatgatatgggccgttctcaactgcaagggtggtgtcggcaagacgaccagtgccctcctgctggcggcagccgccgccaagcagggccacaccaccctggtggccgacgctgacccccagggcaccgcatcccagtggtcagccctggcaaccaaaaacgacgaacccctgcccttcccggtgcaagcggtcaacatcgccaccatggaggcactgcccaccaccaccgacgcccatgatctcatcctcgttgacacacccccctcggcaggcgatctgatgttccaggcatgccgcatcgccgacctcatcatcatccccaccgccacctccggacccgacatctcccgaacatgggtcaccatggacgccacacaaggcacaccacgcgcgatcctcctcacccaaaccgaacacaaccgtgtcgtctaccgccaagctcgcactgccctcgccgccgacgacaccgtcgttctcctggaccacgacatcccccgccgtgaatccatccgcacagcatggggcaccaaccccccagacgacgtcatcacctactacctgcccgtcctcaacgaactcatggaggccctgtcatgaccaccaa

SEQ ID NO: 344 - DNA, 1473 bp, Propionibacterium acnes
  source 1..1473: mol_type = genomic DNA
cagatcactagtcatggcggggtgcgtgatacccggatatcggtcagtgatgacggggccactgtcacggtgaccgtctcaggtcgggccccatcgatgctggggctgcatcttccggctgtgtcgtcgacagcgtcgatgcccaaggagcgcctgtcgtgaggcgaagtgagcgcggtggagcaagtctaagcgtcgaggtgctcatgtgggcgccgatcgcgctggtgatcatcgggtttgttgtgggtatcggccggatgtcgatggcccaggacgcggtgaatggcgcggcgggtgctgcggcccgtgcggcgtcgttggagcgtgatggacagtcggctcagtctgcggcgcagcaggcggcgtcggcgaacctgtcgtccggtgggctggcatgtgcgccgaatgtgagcgtggacacgtcagtgtttgcccgtcctgccgggcaggcgggcacggttcacgccacggtcacgtgtgtcacctcgctgggtcttgggttcgggtcccggacggtgcacgcaacggggtctgccccggtagacacctatcgggaaaggagaggctgagatggcccgtgatgagcgtggtggcggctcggtgtcggtgtggatgctgctcatggtgccggtgattctggtcatggccggcctggtttttgacgggtcccgtcagatatcggcaacccaggcggcccaggacgcggcggttgcggcatcccgcgccggaactgatgcggcagcgacaccgcagcttgctggccacgacggggcggccgtagcagtccaagcggcccgccaggcactatctgctgccggggtggacgggtcggtgcaggaggacgggtcgaccatcacggtgaccacgtctcaaagtcggccgacagtgttcctgtcagcgatcggaatcagccaggtaagggggcatgggcaggcccatgctcagcttgtgggaccgggagaacgcccatgacagtgatacgtcgtatcggtgccctggtggcactgcttgtggtgatagccggcttaccggccgggctcgtggccgcaggcgccccgctagtaccggcgggcctgtcatgggcccatgtgcggcatctgttggttaccccagacatgaccgggtcggtgctggtgtggctggtcagcctcatcggctggatcgggtgggcatggttcgccctggccgtcgcagccgaagcggtgacgatgctctcagggcagcggctgcactggcacatgcccggccctcgcctagtgcgccgagtggcagccggtcttctcattgccgcgttcgcggccgcaccggcagccacaagcacggctcacgccgccgaggccacccatgtggcggtcgccgcccaggctggaccggcacacgcggcccccgcccaggacagccccgccaccacctctcaggccccggacgcctccaccactccgaaaatctggaagacctacacggtgcggg

SEQ ID NO: 345 - DNA, 1515 bp, Propionibacterium acnes
  source 1..1515: mol_type = genomic DNA
aaactggccgggatgaggatgacggccgcgccgacacttcggagcgaggtcatgtgacgatccttcggtagctcgacgggttgccgtagatcttttccacgttgatgccactatgtgggttgtcggcgctaaccatttggcctccaccgatgtagacggccacgtggtgggcagggcttccccagaggatgaggtcgccgactttgagctggtcacgggccacagcagtgccgactttctgctggtcggcggcggtgcgagggaggctaatgccgatacgccggtacagcgccgaggtcaggcctgagcagtcgtagccgccatcggctttgccgttgccaccccacacgtaggcgtaggagttgttgtcggcgatcgatttggcccatgccacggcttcggccaggttcttcgacacaccggtctcgttagcggccccggtggcacagttgtttgacaggtgccctgtagtagtggatcccactatttgtttggccatggtttcccatttggcgtaggcatcgggcagggctgagccttgcactgcctgagctgcctgcgtcagcggcatcttctgccagtcagcgatgtcgactaaaccgggaatgtggaatccagggccgccggccgatccggggccagcgtaggtgatggtgtggcctttcaagaacgcctcggtggcgtaggcatcattgttgacctgatccagagtcccgtaccagcccggcaggatgcgctgctgaaaggggccggcgtcaccgtcaccgttagccttcgctgaggtagggtcggccccaagatctgattcttgtttggcggtcatgatagcgatgaccgctgcctgggtaggcagtttgtcacgctggaccacagtgacgatggtggtcacgagctgcttctgcctggccgtgaggcctccggcacccacagtgcctccggtgacggtacccacgcaagcatccccgccgacactgccaccgccgccgccagagttgtcgtcgagggccccagagcctactgacagcagcggcacaatgatcacggtcgctggcaagaccgccaggcccgccagcatcagcactgctgcactcaccacggcgatcacgtgagatgctttcaacgctgcccacctctcgctggtttgagggggcgacgcctgctggtacgcacaggcttggttgatccagtccgccgttgattggcaggcctgggtttgatcggcttgctgggacccggtttgggctccggagtcttaggctccggcttcacatgcctaggcacttcggctgcggtgggaggagtcagcacgtggcgtaccggcttggtgaccttctgggcacccgaaacaaccggcttagacaccaccttggcacctttgaccaccggtgcggctgccttcgcgccggccttcttgactgcacgatgcgctttgatagccccggcctcggcccggccaaccctactagcagtagcatcgagggctctgtgacccgtcgttgccctcaccggtgcatc

SEQ ID NO: 346 - DNA, 1791 bp, Propionibacterium acnes
  source 1..1791: mol_type = genomic DNA
aagggtggcctggtacccggggaacccgcacccgcgaccctgtcgaactacgccaccggccaggccctcaagaactacatgaccttcatgcaccaaatctcgggtctaggtctcacatggaagtcgggagcctcaaagatcactgtggtgcgggagaaaaagggtgataccacctaccccgaggccgctatcgccttggaatcgtgcgaagacggcagctccatccgatcggtggaccgccacggacaggctgaccatggccggctcacacacgtcgacagttggtatgcccgcgataagaagggcaccatcaaaatgatcgcacgtaacggagtggaggtttcctcatgcgacgtcaagtaatcaccgcggccgtgctgggcctgaccctggccaccacctccctgcccgccctcgcagataatggagacttcagtggccatacagacacggatggtcctggttacgatgtgcgtactgaggtggattaccatcacaccaccggtggtgcgggtgggggtgccacgacagggggccatcatgggggcaaaacccacggtgatggtgaaggtgaggctattgatgggcgttctcgcgccgatgccgaagccgaactagacgaagccgaccgtaaccaggacttgacttgtgatgtcatgctcccaccggcgccgaataccccagccggccaggaatgggcgaaagaatgcaatcccccagcgaaaaaggggcagaaggccaccccgaagcccgacccggtgttagtgggccgtcacgcagccttgcagctcacccttcccggcgcggcccctcgtatcgatccgtcccccgaccttaaccggtggcactcggcagcagtgggccaggctttgtggttgtcagttgatgaccccaccgccactacacagaaatcgatcacgtttatgggccaggttgtctcgttgagcgccaaacgtaacggtttgtcgtttgatatgggtgatggtcatgtcgtgcactgtgatgccacgacgacatggacggagtcggtggaaccggggaccccctcacccacgtgcggttacacctaccaacaggcagccccggccgggggctataaggtcaccgcaatcacgtcgtgggatgtgacctggtcggtactaggacacacgggcacagtccatatcgagaaggccggtgggcagatgcttccggtcggcgagttggagtctgttgttacacggcgatgactcctgatagtccgacgctgtatgaggtgttgggggtctgccctgatgccactgatgaccagatcaagacggcgtggcgtcgtgccgcgaaagtgactcaccctgatgccggtggcactagtgaggcgttcgcggccgcccggcacgcctgggaggtgttgtctgatcctgcccggcgcaccgcctacgatgccgacctggcgggggaggatgatcccgacgacgaagccgccgacgccttcgacgttgatccgttcacggcatggccctggtgcgccccgtacatcgacgccacccccaccctgcgccacacctgccccggcacgatcaaggccatcgtggtcgccatcgccgggatcatggccggaatcggctggcaggaagcgctggaggccgtggtgtcgccgccggggtttctgggggcgtgctggatagtctcagtgccggttgtcgtcgcagtgacatggctggcagcggtgacgggtctggcatttttcaccatggcggccatctggtgtggatggtcgttgataggtggtgcgttgctgtggggccagacgtc

SEQ ID NO: 347 - DNA, 1079 bp, Propionibacterium acnes
  source 1..1079: mol_type = genomic DNA
caggtgggtttgaccgccagcgtcggattggtgctggtcgctgggctgatcaccactctcaaccgtcgttaccggacccggttcacccgtcagccccgcggcaaggccatgaccctgcccagcccggacgcccaaactgccgagatagcgctgcgcagcaccggggcgactgacactctgacgatcacctgcctcgaccaggcgctccgcgcgatcggcgcatggtgccaccactgcgggcacccgctgccacccctgctggccgcccgcgtcgatgacgaccggatcgacctgctgctatcccaggcggcccccgaccatcccgaggcggtggagctggccgccgacggatcggtgtggaccctcaccgccgaccggatcgacgacctgctagcccacaccgatgacaaccaagcggctccgtggccgtctctggtcacactgggacgcgacgacgacggcgcccacatcctcatcgacttggaagccgcaggaaccttgcacctgatcgccgatgacgaccaggtcgacgcggccctcgccgcgatcgccgtggaactggccacctgtgactggtccgacgaggtcaacgtcaccctggtcggccaggtgtgcccgggcctagaagacgcactagagtctccgaccctgacccgcgccaccgacgtggacgccctcctcaccaccctggaagctcgcgccgacgaccagcgacacatcctcaccgaaggaagccccctcgccgctcaccgagccgaccccgccatctccgacgggttcgacgccgaagtgatcctcctcgacaccgaactcaccgaagaccaccgcaaccgcctcgccagcctcgtcgaggctcttccccgcgtgtcagtcgccgcggtaacaaccagccccaccagcccagacgaatggtccctcaccctgacaggtgacccactagccgccgacgtggctcccctcggctggcacatccacccccaaaccctctcccccgacctgtacaaccgcgtggttgaactgctagacaactctgcggccgacgactacgcacccgccgactggtgggaccatgacgccga

SEQ ID NO: 348 - DNA, 593 bp, Propionibacterium acnes
  source 1..593: mol_type = genomic DNA
gctgagaaaaattttgggtccgccctgcatatcggggcctcttcataccttcaaaagtgtgaagggaatacagactcttcgactggaattaaaatggtatatggcgtgtccggtccgcacccagctccacgatgcgccatagaggagccataacttcaccaatcgtatacgatatgagtgtaggtgagcatctaccggtgaccgacagtcagatacaagcatgggcggatgaagcagaagctgattatgacctcagcatgcttccgccgtctcgacgtggtcgcccaccggtggggaggggcccgggcactgtggtccctgtgcgcttcgacgcggacactctcaaggcgttgtcacaacgagcccatgacgaaggattgaccacgcgttctgacgcgatccgtgctgcggttaaccagtggctcggcctcggctcgtaaacattatcggcgcgacaaccttactgatgacgctgttggttacgccgtagagcacatcttgtactcgtgggcgctcgacgatgctgatgatcctcgttgctggatgatgattcggtgttgacccagctggcctcctcatggagctagttatcc

SEQ ID NO: 349 - DNA, 1791 bp, Propionibacterium acnes; identical to SEQ ID NO: 346
  source 1..1791: mol_type = genomic DNA

SEQ ID NO: 350 - DNA, 1079 bp, Propionibacterium acnes; identical to SEQ ID NO: 347
  source 1..1079: mol_type = genomic DNA

SEQ ID NO: 351 - DNA, 593 bp, Propionibacterium acnes; identical to SEQ ID NO: 348
  source 1..593: mol_type = genomic DNA

SEQ ID NO: 352 - DNA, 1515 bp, Propionibacterium acnes
  source 1..1515: mol_type = genomic DNA
tggaccaggtttgcggggcatgcgcgcatcggtgatcttggccgccaccaggtgttccagattgtccaagtgcccggagtcagaggtcagcagaagagtagtcacctcgaccgcggtggctgaggcgatctgagctgtgcggcggtcgtgatgggtggtgtcagtgctgacagctgtggtgggagcggatgccggggccgccgaacggaccagggcaacggggccgcatgcgactccgcacagcacgagggcaaggaagcctttggtggccatcgatccggtgtggggccagggacccacgttttcctgtgcctgttttttcttggccgaccaacggcgggacttagggttagcggatgcaccttctggggtgcatgctcgtctcaatcgcatcggtcacctccttcactggatgaagggaccaaggaggtgaccgatgtgcggtcgaacccgaaaaagttcaaacttttttctgggtctgcctcaagtacgacagaaggcctgcatcatcacggcgttgtggtagcagatcttgcgtcagcgcaaatgcatgggcctcgtaggagtagctcttaggtaggtcccggtggttgcggccagggcgagggtgtcgggtatgtgtagcgctagtcccgggttcgtggtgtgagggcttttgggtgctgacatgcactacccattgctagacgctgtgctgtggcatggctggacgtctagcagacgggttgacatcacctttaggctggcagcgcccgaggccgcaggccagaggaagcggacagcctaacgattgacgtccccctctcctttccccaacctcctggagtcgatgacccggagatagatcgatgtctatgcatcggtgcatcgatatacctatgtatctgtctgtggtttttagaggccactcccgtcgccccgggccgctcagcgataccgcaaggctgtgtgggatcagctgtgccgctcccccgacatggcagacagcaccgttgcatgagaactgactgacactgtggcgccgcggaggtctcccgcggcgtccgctggggcgagtgcatgcctgtcagctcatcttttatcgtcatgtttccccttgtcagagcggtctttgcaaagtgacaacgtcaggggtcttgacgacaacatcctcgacaacatcgtggcggtggtctgtgtctcgtcagttcaacgcaccggggaaagaggcaccgctgatgttcaccaccacaaacaccctcaacgatgaatgggaccagattcgcgccactgagatcgattggcatgactgccctgaactgatgcactgcatcgacgttgatgatgtgttggccgtcattcctgccgcccccgacgccatcttgggctacctcattgcccgggctcagggcggtgacgagttggccacccgcactatcatccaagcgttcacaggcaagcttattttgatggccacggccaccaaggtgcgccgtactaatgacggcttcaatgatctgttggcgggtctgtggg

SEQ ID NO: 353 - DNA, 1766 bp, Propionibacterium acnes
  source 1..1766: mol_type = genomic DNA
ttaactagggtcattgtcggtgaggtgcgcggcaatgaggcctcggccatgttccaggccatgcagtcgggtacaggcaccatgagcagtatccactccccgcgagcctctgaggtgccgtcccggctagcccaaatgatttcgatgggcccggtctacgatctggatcaggccatgctgcagatcggtcattcgatcgactacatcgtctttgttcgtaagcgtgacctgcctgatgggagccggctgcgatttgttgagcagatccgttcagtctcgcctggtgattcgacaactcccagtcttggcgaggtgtacacggctgactcgtggacaggccagccgcttacgccactcatgcctggttcggccgccgacgagctgtctcacttcgcccgagacctggattactgcgaggcccactcatgaacactcccgcactaaccagcgccctcatcgtgaccgggctagggctgatcctggccatcgacgggctggtcccggcgccgcctcgacctggtgccccgctgagcccggcccaaaggtgggctcggctcacccaccgtcccactggtgcggccgggcgtcgccgggatttgcgttgggggttggctgttcttgtcggtgtcgtgctgtttgtgctcaccgggtgggtggctgcgctggcgctgggccccatcattgtgttgttggcccccaccctgctgggggcggccccaccgaccgatattccgctgatggaggcgctggatcggtgggtgcgtcaggtcgctgcggtgctgccacaggggcgagacatcatcacagcggtgcggatctcacggccgcgggccccgaagctgatcgccgggtcggtggatcaactggtgtcccggttggatggccgtatggagccgagggaggcgttccagcggatggccgacgagctggactcggctgaggctgacgcggtgctggcctcactagcgttggcggccactcatccgcggggagcctcgacaacgttgaaggctattgctggcaacatccaacagcggttgaaagtgctgcggcaggtggaggctgaacggtctaagccgcgtaactcggtgcgccagatcacactggtcacgatcgccatgttcggggggctgctcgtgatcggacggtcgtttctggccccgctggcgacccctcccggtcaggtgctggtggccgtggcggtggtcatgtatgtcatcgcactagtgcagatgtatcggatggcgcggccccgtcgacgcacccggatcatggtcaggaggacccgatgaccattactgctttgtccctgctagccggggccatcgtcactgtcggactgctggtcatcgtggcagcgttccgcccagccccaggccctgacctggttgccgctctggaggtggtgtcgggtcgcacctcaagcgtcgccgagaacgtcgaccagacccggatcgggcggataggtcgcagcgtgacccgcacattccatgtgtcggtgtccccggccatgcgggccgcactgcggctccaaggcacgacccccgaagcgttctacggtcgacgcctgatctgcgcactgatcggggcgatcctgccgtggctgctcaacgcggtagccatcgcggtaggggcgaattccccgaacctactcatcccttcggcgctgtgtgtggcgttagctggcgctggatggatgctgccggcagcacggttgaaggctgcggccgggcccaccaacgatgactcgttcgaagcgctgctgg

SEQ ID NO: 354 - DNA, 1453 bp, Propionibacterium acnes
  source 1..1453: mol_type = genomic DNA
catccgtgacaccgatctggtatcggtgactgtcggccaggtcgacaacgtatcaacggttcccgcagaccagctcgactcactggtcggcaaacgcgccacggcagatcttcgagccggatcactcttgcctgctggggctatcggcccggccgatgtcgttccagctccgggcaagtcgctggtcgggctgaagctagccgccggacagatccctatcggagaccttgctgccgggacgaagctgcgcctgatccagacgtcggcacccagcggctcatccaccaccactgatagcagcaccaataccgatggccagtcgtgggaggcaacaatggcgaccggcaccaaaaagaccgagcaggtcaccttgatcaacgccgaagtgaactcgcgtgatgccgcccggatcgcccaactgacgtcacagggccgtatcgccgtagtgaaggatccgatccgatgagcaccattgttttgaccagcgtctcgggagccccaggggtcaccacgacagcgatcgggctgggcagggtctggccacaatcgagcctggtcgtcgaggatgacacccaccacgccatgctggcgggctacctgcgagcctcccagcacgccgaaccgaacctggccgcagtggcgaacctgacgtcgactccaaccaacgcccaaacggtgtgggaatctatcgccagacccctacccaccgatgacccagtcggcgggctgcgacgcaaaggcatcctcggcccgcccacgccgtggtctcgcgcaggcatcgacccccgatggggattcatgctggccctgtggcggcaactggaggaggctggcatcgacaccatcatcgatttgggtcgcctagccacaccactgacctcaacgccacacctgatcgccgcacccatcgtcgaggacgccgacatgatcttggtgatgatcgaggcgacactacgcggcatcgccggcgcccgcacgatggtggagggactcgctgagcagatgaacttggccggcgcctaccgacgtctcggactgcttgtccaccgtggcggccaggcccgcggcgtcgccgagttcaatgacaaggagatcacctcggcgttacgactcccggtcatcggggccattacccacgacccggccggagccgcccaactctccgacggggtcgggcagcggttcgacaagtcacgtctggcccactcactatcaaaggtggcggccagcctcgtcgatgccataaacaagcgccacgctgatgacgaggaggatctgtgatggccagttttgctgataatccgttcgacaagctgcgctcccaggatgcggcaagagcttcggtagagcaggagcctgatgccggattagcgtcggagttgttttcgacgtcgtcggggtgggccagctctcagcaggtgtcccaagctcaaccggtgatgacccgttcgga

SEQ ID NO: 355 - DNA, 1466 bp, Propionibacterium acnes
  source 1..1466: mol_type = genomic DNA
tctggggagtctgggcccggaagggccacgggtcggggcaccatcgagggcagggggtggcggcgggtgacggtgatggtgtcgtgttccaggtcgaagtcgctgcgccactggccgagcatcatcgccgaggtcaccgcggccaggcgcaattggatgttcgggctggacaaatgggcgccacgttggtggtgaatggtgaagccgtccaggttcccccgatcggttttccaggaatcgacggtgaccgccgacccatagatctgagtggctacttctttagcccgttccttgtctcggtccagatcggttttgtcagggtcaggggtcggggcgcggtattgcaggacgaaccggccggccgggatcgttgcggatgtcaccgtgaactctgccggcgaccaggcagccgcggccgcctgggtgagggccattggcatggtctcgacggcagcctcctcgggggggatggtgagggtcaggcgtcgcggatgcgtcttcttgcgattccatgtgactttctgcctcaccggcaccttcgccgccgactgaatggctaggcgagctgattcggcagtttcggtacgccggccagcgcgtagcgcccgtcgtgcgtgaaggctgcccaccacagcacagcccatacacggcagccaccagcgcggatcagcggctgctgcatagcccccggtagctagtaccgcacctgaccagccggccgcgatacttttccacgccggtttcgcgccaccaggaccagcgttatggacggtctgcttcgaggctgcggagggacgagacagcggagtgctggtcatgccgcggcctccttgtggcaggtcatttcacaggcatgccggccagcgatgatgccgtggcgcaccgccccggtagccgcatagaccgcgcacaactcaaacacggggcacccatcgcaggccgccgggttcatgctttctttgtcccacgatggtgggtcatcggtgcacggcacggccaggccatcctgttgagcggcgctgatagcggtgaataggcgcagctgggcgcgaacttggtctggggtcaggttgacggtgcgggctacacgcatggggttccttcctcttcaccagtgaaggttccctagacccggccgatgtgcggagggatttcagtgttttatcgaggtgaccagccagccggtctgcgctgcgggttcaggtaccagggtcagatgcagcatggtgtggtcggctaggggcacggcgaccaggggcccgtcggcgctcgccccggtgagggtgggagttccggccacggtggtggcgggaatctggttgggtttcgcggccatcagggagcccatgagggtcggggcggcgatctggacgagggcgactttgcgggcggcgggatcgcgggtcaaccagccgcgggtgaaggtgagcgcagccgacgtgatatcggggctcagcggggctggt

SEQ ID NO: 356 - DNA, 908 bp, Propionibacterium acnes
  source 1..908: mol_type = genomic DNA
ccccaatgcccccacaacgatcagcacaccaacagcgatcatcaggtgggcagcactaactgatcccaacggaccaagatcaaacaagccctgcccgggagcgccgagcagtccgtgggcgcgaagccatgctccgagattgccaatgatcttggggatcatcttgttcagtagggctatccctccgatgccgacaacgaggaagacgaggatttcttcgcctgcgttgtttcttcctgtgtttgcggtcatgctgccttctcggggtggatggccagccagctgatgaggttgtcggtgatctgccctgagatttggatcagttcgacttgcccggcctgccatgcccgcgatgtgccggccagcaatgatgctgggacccctactgcgcggccacgggatgcaacctcagccaaggcggcgcgtaactcctcgacggtgctttcgatgtaccaactgccgtcagtactagtctcagcggcatcggtggtagcgataagagcatcggtgaggtcgtcgacggcgcggtccagatcagcgatgtccggtagggctacaggagtcatggtgtgtcttccttctagggtgccttcactggtgaagggtccctagccccggccgatgtgcggttctgtgggaaaaatgcttcccattggtccgtcttagttaggaaacttggcctaagtgctgtcgagggtcgcgtgttcgtgaccggttcgaagacactgccgccttgccttcttgtcagtggcgtttccgagatggggtcagtgggcgatggctaggccgatgagggcgccgctgcacaggctgggtgccaggggaggaatcgggtggtgtggtgtcggaaccggtcgattagggcatatagggcgatcagggtgaggccggctatgacagtgacctgg

SEQ ID NO: 357 - DNA, 1602 bp, Propionibacterium acnes
  source 1..1602: mol_type = genomic DNA
gacgccttcggcgtcgggtgagcgcgtggataggcgccccttcggggcacctgtaagcctgtatcgctgcggtttacagccttggccacccgaaaggggcggcaaggggccaggaggggcattctgcgccgctgatggcatctcacatgtgagttattctctcaactatccttcaagtcaagcgtattagattatttatccagtactcttgacagtctgtctatcgggctatatatttataagcagaacgagagatcgggaaaggaatcaacgatgaagtacaccgcacacgtcaacatggtgaccaagccctacatcggacttcccactacccgaaccccctacaccctcgtcgacgccgactgggccacaacatggatgatcgacgaaacctacgaagcccactaccacggcaccagcgtggagatcagcatctacggcgaaggccccgactgctccgtactcaccaaccgcatctacaccgaccagcccaccgatgtgaccgctgcactcgccgactacggcttcaccatcgacaccaccaacacatccaaaaccatcctcacgctcacccgcacagccaccatctcccacctgctagccatcctcgatggcctaccccaagctgaggggactcactggctcaacactcaacccgacctccaccacatcaccctcgacgactccaccaccggctgggccaccaaccgcaccgacgacaccgacaccggcgtctgctacgacaccagcacccacaactggcagatctgctgacagcatgacgggcctgcccttgaggggaagttggactctgcacccatttcagccgggtacgttgccggctgggcgaaggaagcagacggcgccgcgattgaagctgccgccgagcacgtcgcgaagacctcccacgcgattgccgaggcgttgcagctcaccgcacagtgagccccacggggcgaccggctcaccccggtcgcccctcaccccccgacaggggaaccgttcccgccgcctgaatctccatacccctgatacgtactacgcggggtcgaggagtggactcccccaccctcgtgtagtacattgtactatagacgtcttacgaggtgacaccatgagtttttccatccgtttaaccgaccatgagcgccgcttagctgattcctacgcccacctacactcgcagtccctgagtgaggctttcaagcaagccctcttcgaccgcatcgccgacgagttcgatctgcaagtagcccgtgaggcactcaccgactacgccaacgacaactaccagtctcgtcccatcagcgagctatgggacgagtgtgacctatgacttggcagatcgaaaccactagccggttcgataaagaattcaaaaagctagaccgctacacccaaaaactcattcacggctggatcacgaaaaacatcgacaacaccgacgatccccgccgccacggcaagcccctcaccggtgatctttctggactgtggcgctaccggatcggtgattatcgcctcatatgcacactcaacgatgaccgcctcatcatccttgccctgtccatcggtcaccgccgcgacatctaccgataagcc

SEQ ID NO: 358 - DNA, 1452 bp, Propionibacterium acnes
  source 1..1452: mol_type = genomic DNA
cgctgatgaggctgccgagttggcgtggcggttcgtggggtggtgtcctcagctggtaggggcaccgaagaaggtgcgtggccagctccgtcagctggtcgctgccgagatccgccggaatccgggctggctggatgcgccagcgttggaggttgttgcccagcgggtacgtgctgaaggtgcgctgggggtccagcactgcgagattgtgcgagccgagctgcacggggtgatcgccgaccagaaggccgcccccgcccgccccgacgccctgcacgcgcgggagcccaagtggtgggacgacgtgtactacgaaggaaacacaaccgtgtggtacgactctgacgaaaccagtgacgacgacgaggcgtggaaccggtcgcaggtatgtcatgttgctgagcgtgacgacatggctggcgggattgctaccaacctgctggcctcccacgctgatgatccgatggcctggctgactcgccgtcaaaccatgctgatggctcgtttcccccacgcccagaacgaggtcatcgcgatgtgccacatcgtgcgcaccgccctggaggccgacatggccgccggaacccggtgggaggactgatgagggtctcccggcgcgccctcatggccgtggcccgtgccgacgctgccgcagcagaccatgccaccggccgatgggtggccacagccaacgccaccgtcgcccggctgaccggactgtgcgaacgcaccgtccaatacgcccgcgccaccctggtccacctgggcctgtgccgcgtcgtggccaccggccgctacctcaccgccgacgagcggcgcacggctgctcgcacccatggcggccgccagatgcgcgccgcctccacccgcgtcctcaccatgtcctgcgcaatcgtttgcgccctaccccgaaggggtcaccactacaggaaagttaagttcctagatggtcaccaacgcacgcgcaggcgcgtgcgaaggccagcaacaccagagaagaaacccctgtggctgcaaaaactcgcagccctcctcgaccagcacctgccctggctggtgagaaaccatcacatcggccgactgtgccacgccctcaccgccctgggcatcgacgaacactggcaacccgcagacctcgacgccctcctcgacgccatgaaccgcaggaaccgtcgcctcggcctcgacgtgccatgcgccgacgaccagcacaaccccttgggactgttcatccaccaggcccgagacaccctcacccacgacaacccccatgaacgccgcctggcccgcgaacaccaccgcgcccaactcatcgacgaccaactccgccgccgcgcagaaaccgccacctgcgcagcccgcctcgcagccgagcacgccgaccccgactaccagacccgccgtcgtgaacgcagggaaaccctgcgagccacactcagggccgcccagcag

SEQ ID NO: 359 - DNA, 1595 bp, Propionibacterium acnes
  source 1..1595: mol_type = genomic DNA
cggcgtcgggtgagcgcgtggataggcgccccttcggggcacctgtaagcctgtatcgctgcggtttacagccttggccacccaaaggggcagcaaggggcccggagggggcattctgcgccgctgatggcatctcacatgtgagttattctctcaactatcctttaagtcaagcgtattagattatttatccagtactcttgacagtctgtctatcgggctatatatttataagcagaacgagagatcgggaaaggaatcaacgatgaagtacaccgcacacgtcaacatggtgaccaagccctacatcggacttcccactacccgaaccccctacaccctcgtcgacgccgactgggccacaacatggatgatcgacgaaacctacgaagcccactaccacggcaccagcgtggagatcagcatctacggcgaaggccccgactgctccgtactcaccaaccgcatctacaccgaccagcccaccgatgtgaccgctgcactcgccgactacggcttcaccatcgaagccgccaatacatccaaaaccatcctcacgctcacccgcacagccaccatctcccacctgctagccatcctcgatggcctaccccaagctgaggggactcactggctcaacactcaacccgacctccaccacatcaccctcgacgactccaccaccggctgggccaccaaccgcaccgacgacaccgacaccggcgtctgctacgacaccagcacccacaactggcagatctgctgacagcatgacgggcctgcccttgaggggggggttggactctgcacccatttcagccgggtacgttgccggctgggcgaaggaagcagacggcgccgcgattgaagctgccgccgagcacgtcgcgaagacctcccacgcgattgccgaggcgttgcagctcaccgcacagtgagccccacggggcgaccggctcaccccggtcgcccctcaccccccgacaggggaaccgttcccgccgcctgaatctccatacccctgatacgtactacgcggggtcgaggagtggactcctccaccctcgtgtagtacattgtactatagacgtcttacgaggtgacatcatgagtttttccatccgtttaaccgaccatgagcgccgcttagctgattcctacgcccacctacactcgcagtccctgagtgaggctttcaagcaagccctcttcgaccgcatcgccgacgagttcgatctgcaagtagcccgtgaggcactcaccgactacgccaacgacaactaccagtctcgtcccatcagcgagctatgggacgagtgtgacctatgacttggcagatcgaaaccactagccggttcgataaagaattcaaaaagctagaccgctacacccaaaaactcattcacggctggatcacgaaaaacatcgacaacaccgacgatccccgccgccacggcaagcccctcaccggtgatctttctggactgtggcgctaccggatcggtgactatcgcctcatatgcacactcaacgatgaccgcctcatcatccttgccctgtccatcggtcaccgccgcgacatctaccgctaagcc

SEQ ID NO: 360 - DNA, 1388 bp, Propionibacterium acnes
  source 1..1388: mol_type = genomic DNA
gggttgccatcggaataccgtggaccatcccggcgcatacacccagacggtccaagatccaatccacgctcacccgcgacgccgctaacgatcctcatacaccgtagatgccgttctgagagccttccagacccgcacgtgggtttattgcaccgagacccaaatcccctcagaagcgatcctgaaaccgtctacgccccatttccgacggacgctggacaggctgggcggcttgtctcccgccgcagacatggccctggcatatgcggttgccgactggtgggatcagggattggatcacacggcagacggctggtccaaggcgggtgtgcaggtgcggtgagcggcagacgtgaccggtggggtgcactgtcatggccgggcatctgccgagccaccatgcgggccctggaccaggaggcagcccgctgcgaggactgggggaagacggcggcacggatgggccgtcgggatgcggcggccgaattcaccgagactgcggtgcagcatcgtggacagatgcaccacctcatgtcggcacaaaaagtgtgggtgtcgaccgacatggtgtcggctacactggacgccgcaggagacgtgccgagtttcgaggccgtcgacgtccctgccgccgggctcatgggtttggccagccccctgccgccggttaccctgcagcatccgctgtatctgcgcagcgacgagggtgtgacaaccttcactgatccggttctcgtcgacgcgctgggatggtggatggattctgggcgtgtgcacgtggtgatgtgcacacgcacaccccggctgcccaacccggtttatgcggtggcctccccactgacggtggtggagaaaatcacggtgcccaccggcatcgagttcgagaccatggagtccaggatcctgacccccggcggcgtgacaggcgtctcacggcagggcacacgcatgatgatccggttggcgtcatggctgggtgccgcgtgggtgctcatggcgactccgacggtgtcggagccgcaccctatggatggccggtggggaggcccagcaacggggcagacccggccgcgtgatcgggtgaccgtggtcgacatgcggcccatgaggcaggtgcacaccaccaccgaccccaccggcaggcggttgacgacccggcatgtcgtgcgaggacactggacacaccaaccctacggcccggcccgcagtctccgacgcctgcagtgggtcgccccattcatccgcggccccgaaggggctccgttcgtcggcaccgacaccgtcaccgtatggcgccgctagatacgcgggcgcggggggttgacgaacgatgcccccctctttgtgttgtgatcagtcgtgatcggcgggttttaggtcggggtagg

SEQ ID NO: 361 - DNA, 1578 bp, Propionibacterium acnes
  source 1..1578: mol_type = genomic DNA
tggataggcgccccttcggggcacctgtaagcctgtatcgctgcggtttacagccttggccacccaaaggggcagcaaggggcccggagggggcattctgcgccgctgatggcatctcacatgtgagttattctctcaactatcctttaagtcaagcgtattagattatttatccagtactcttgacagtctgtctatcgggctatatatttataagcagaacgagagatcgggaaaggaatcaacgatgaagtacaccgcacacgtcaacatggtgaccaagccctacatcggacttcccactacccgaaccccctacaccctcgtcgacgccgactgggccacaacatggatgatcgacgaaacctacgaagcccactaccacggcaccagcgtggagatcagcatctacggcgaaggccccgactgctccgtactcaccaaccgcatctacaccgaccagcccaccgatgtgaccgctgcactcgccgactacggcttcaccatcgaagccgccaatacatccaaaaccatcctcacgctcacccgcacagccaccatctcccacctgctagccatcctcgatggcctaccccaagctgaggggactcactggctcaacactcaacccgacctccaccacatcaccctcgacgactccaccaccggctgggccaccaaccgcaccgacgacaccgacaccggcgtctgctacgacaccagcacccacaactggcagatctgctgacagcatgacgggcctgcccttgagggggggggttggactctgcacccatttcagccgggtacgttgccggctgggcgaaggaagcagacggcgccgcgattgaagctgccgccgagcacgtcgcgaagacctcccacgcgattgccgaggcgttgcagctcaccgcacagtgagccccacggggcgaccggctcaccccggtcgcccctcaccccccgacaggggaaccgttcccgccgcctgaatctccatacccctgatacgtactacgcggggtcgaggagtggactcctccaccctcgtgtagtacattgtactatagacgtcttacgaggtgacatcatgagtttttccatccgtttaaccgaccatgagcgccgcttagctgattcctacgcccacctacactcgcagtccctgagtgaggctttcaagcaagccctcttcgaccgcatcgccgacgagttcgatctgcaagtagcccgtgaggcactcaccgactacgccaacgacaactaccagtctcgtcccatcagcgagctatgggacgagtgtgacctatgacttggcagatcgaaaccactagccggttcgataaagaattcaaaaagctagaccgctacacccaaaaactcattcacggctggatcacgaaaaacatcgacaacaccgacgatccccgccgccacggcaagcccctcaccggtgatctttctggactgtggcgctaccggatcggtgactatcgcctcatatgcacactcaacgatgaccgcctcatcatccttgccctgtccatcggtcaccgccgcgacatctaccgctaagcc

SEQ ID NO: 362 - DNA, 1665 bp, Propionibacterium acnes
  source 1..1665: mol_type = genomic DNA
ccccaatgcccccacaacgatcagcacacccacggcgatcatcaggtgggcagcactaactgatcccaacggaccaagatcaaacaagccctgcccgggagcgtcgagcagtccgtgggcgcgaagccatgctccgagattgccaatgatcttggggatcatcttgttcagtagggctatccctccgatgccgacaacgaggaagacgaggatttcttcgcctgcgttgtttcttcctgtgtttgcggtcatgctgccttctcggggtggatggccagccagctgatgaggttgtcggtgatctgccctgagatttggatcagttcgacttgcccggcctgccatgcccgcgatgtgccggccagcaatgatgctgggacccctactgcgcggccacgggatgcaacctcagccaaggcggcgcgtaactcctcgacggtgctttcgatgtaccaactgccgtcagtactagtctcagcggcatcggtggtagcgataagagcatcggtgaggtcgtcgacggcgcggtccagatcagcgatgtccggtagggctacaggagtcatggtgtgtcttccttctagggtgccttcactggtgaagggtccctagccccggccgatgtgcggttctgtgggaaaaatgcttcccattggtccgtcttagttaggaaacttggcctaagtgctgtcgagggtcgcgtgttcgtgaccggttcgaagacactgccgctttgccttcttgtcagtggcgtttccgagatggggtcagtgggcgatggctaggccgatgagggcgccgctgcacaggctgggtgcccaggggaggaatcgggtggtgtggtgtcggaaccggtcgatgagggcatatagggcgatcagggtgaggccggctatgaccgtggcgtggatcgtgtcgatgccggttgctgcggccggggctgcccacagtggtgtgatgcgcacgtcggagaagccgaagccgcctcgggagatgagccaggcgatcatccacgccgcggagatgacgacagtagcgatagcagcacgtatcgccgcagtctggttcgcgagagcgatcatggccacagccccgatccatccaacccagccggtccaggcgaggactgccggtatccatgtggtgatggcgtcgatgacggctacccatgccccgatggtggctagcagagcccaggccggccaggtgggtgctggggcccacgctacggcggcgatcatggttgtcgcagatgcagcacagacagcgatcatgcttcggagactgtaggtgtcgcggtaggcgattttgtcgggggtggcggtggccggttcgggcaggatgcgagtgagggcaggccatcctgcggtcgcaatggtcacgacggcggcgatccacacgatctgttgcatgggtctcatcatggcccaatatcgatgggtgtgggtggccgacatggggtcactcgtagaggggatcgaggggtgtgcgggcgagcatggcttcctgtgtgccgagcatgagggtgccagaatcctcgccggctgattcccagtcgacgatgatctgcccgctgtcgacgctggattcggtgatggtcacccattctccgtcgatattgatgagcaccccagcggccagctctgtggcagcaaccgggtgagg

SEQ ID NO: 363 - DNA, 1497 bp, Propionibacterium acnes
  source 1..1497: mol_type = genomic DNA
gataccgcaaggctgtgtgggatcagctgtgccgctcccccgacatggcagacagcaccctgcggactgactgacactgtggcgccgcggaggtctcccgcggcgtccgctggggcgagtgcgtgtctgtcatctcatcttttcccgtcacatttccccttgtcagagcggtttttgcaaagtgacaacgtcaggggtcttgacgacaacatcctcgacaacatcgtggcggtggtctgtgtctcgtcagttcaacgcaccggggaaagaggcaccgctgatgttcaccaccacaaacaccctcaacgatgagtgggaccagattcgcgccatcgagatcgattggcatgactgccctgaactgatgcactgcatcgacgttgatgatgtgttggccgtcattcctgccgcccccgacgccatcttgggctacctcattgcccgggctcagggcggtgacgagttggccacccgcactatcatccaagcgttcacaggcaagcttattttgatggccacggccaccaaggtgcgccgtactaatgacggcttcaatgatctgttggcggggttgtgggagacgatcatcacgtacccgttggatcgtcgccctgacaagatcgctgcgaacctcaccctcgacacgttgcaccgggttacccggttctggcgtgctgattcccccgatgaggaagaggctcacggtctggtgcccttccctgacactctcatcgccccagagcccgatgaggacgtcacagctagccaggccatcgccttggcggtggaccgcaactggattaccgaggacctagcccgcctcatgagccatatttactgtgacggtatgactggagctgatgcgggtcgtctgcatggctgcgctccagctacggtgcgatctcgatgccgtgatggtcgggccgtgttgcagcgcaacgccgagacgatcctggccgtctgctgatcctctcttgctcatgcctgccgccaccctacccctacctgctagaaacatagccatgtctccagcaacgcatctagcatatcgtctagcaattgatctagctatgtatatagctgatgatctagctatcatatagctgtgtctccagcccaaatgacagcccaatggcatgcttgccacaggaaggtgcgtcagcctcccgaaatactggaaggagctttaccgtgcaggacatgacctcgaccagaccgattgaccgatccccgttcgaccgcaccatcgcggtatggaaccacaaaggcggcaccttcaagacgtccgtcgtggcgaacctgggatacctgttcgccgccggtggcaacaaggtgctgctggtcgacatggacccccaagccaatctcgacatcgacttcggtacccccgccaatgagcgtgaacgaggcataggattagccgaggcgctacgtgaggggacggcccttcccccaccacagcatctcagcgaaaacctccacctggtcagtggcggc

SEQ ID NO: 364 - DNA, 1374 bp, Propionibacterium acnes
  source 1..1374: mol_type = genomic DNA
gacgggttcctgccaatcgatggttgacaagtcgtcggcggcttgttggtaggtaaggtggatcattggctgtttgagtgcagcgccatgccagtgtctctggccggcgtcgatccagatggattcgcccttggtcaggtgctggggtgcttgtccttcaatatggaccagggcaacgccgcccgtgacgtagaggccctgtcccttggggtgtgtgcctcagcggcaaacgtgacggcgtgggcggcacgcccggcgtcttccgtggcacgatcggccggatccatggcggcgcgcagctgctgttctgcagccaggcgtccaggtcacggcgggcagcatcgacacccagggcagcctcgacggcttcagggctacgacgctggccgggctggttgaccgcagaccactggtgccgggcgtcgtccagatcatggccggcggcgtcgatgagggcggtggtggcttcggcgcagcatcgcctgatccactccgaacgtgacaggccagctgtctcggcggcactgtcaatgcgcgccaggagagatttcatgggcgctcatctgtagcctccagataggcgttgatgtagcgcagagcctgatccgtcatgtcgatggcggctgcctcggcagacgacacaacgggctgtggatgataagaccacccaacatagacggcgaacatcaatttctcgacagctttcatgaggtccccggcggcaaccgcatccgcctcatcatccgaggagaaccacttcaggtctgaacggctgtacatagcccctaggtcctgatgtgggtcgaggtccttggaatgatggaagttcctacacacccatcgccaaagacctcaacatggacaacgctaccttcaccactccctcatctgtgaagagccagtttatgcacggtgttgaaagaggcgtcggtctacgacgaatgcgggttaatggtcttgcggtgtggggcgctgggcgatggcatcgagaacgcgtgagtgggtggcgatccattcggccgcgtcggggttgatgttgcgggcgacggtgtcgatcgctgttacgtagtgggcaagcctgcgaatctcagcttgttggtcagggtgagcgctgatgaggggctcttgatgggaggcgcggttacggacgtggcggatgagctccacgttttcctcgaagtcgcgtcggctacgccccgggtagtgaggcatacctccgttacgtaagtcagtgagagctttccatacggttgcttccaggcgcggggtgagcagaaagcgccagttgtccagtgacagactcgccacgatctgatcaggggtcgcatcgagcctcgcgcgccgcagtcgcttctcggccctgtcgacgttacg

SEQ ID NO: 365 - DNA, 1569 bp, Propionibacterium acnes
  source 1..1569: mol_type = genomic DNA
gcccatccggtccaggcgaggactgccggtatccatgtggtgatggcgtcgatgacggctacccatgccccgatggtggctagcagagcccaggccggccaggtgggtgctggggcccacgctacggcggcgatcatggttgtcgcagatgcagcacagacagcgatcatgcttcggagactgtaggtgtcgcggtaggcgattttgtcggggctggcggtagctggttctggcaggatgtgggtgagggcaggccaccctgcggccgcgatagccatcacggcgaccacccacacaatctgttgcatgggtctcatcatggcccatcaacgccgaaaatgggtggccgacatgggttcactcgtcaagaggtgtacgggcggccgtggcttctcctgcgccgagcatgagggtgccagaatcctcgccagccgattcccagtcgacgatgacctggtcgccgtcaacgctggattcggcgatggtcacccattgcccgtccatgttgatgagcatcccggcggccagctctgtggcggcaaccgggtgggctgggctgtagaggaggtcgatgtcgcgggcagggtcgtcgggttcttcggttacctcgggtggggtcgatctggctgtctcggtgtcgtcggccaggtcggctcccaggatgcgttcccattcggggctggttttcttgcccgctgaggccatcgtctcgtcgatctgttcgtcagtgggccacacaaatttctttttggtccaggtcgtggtgtcgggtcgcagctgatccagcagttccaggtcttgcggggagtgggccttgcgggggtcgggggtgtagaagaattggacttccttgggggctgattcgccggataggtaggtgccgcggccgcgtttgccgaacgggattcccacgccgacgtgttcggagccgaacatcatgcgggctccgtcagcagacaggggtccggtggcggcacgcccggagaagttgtctcggatttcgccgcccaggaactcggcgtcggggcgttgggtccccagatcgacgtggatacggcaggcagctgccatgcgcagcagggagccgatccagccgaaaacggggcattctccgggcatcccagagaccttgatcgttgaccaccagtttttcgcgttgccgtagaactggcggtactcgtcgatgaggaccagcacgcgggtgaagtcggtctcgcgggccccttcttcttcgatgcggcggtagcggtcctccatgagagaccacagccagtggatgagggcgacctggtcggggacggtagtggcgaccatctcgatgttgggccactcccgcaggcccaggtactcgatgcgtttagggtcgatgacgaagacgcgccagttgcggcgggcaccctcgacggcgtcgccgatcatggacaccgtttttccggtacgggtgcggccggccttgagctggtgggccatgacaccggagatgtcccagaaacaggtgttgccgtcctcgtcgacggcctgggggattttctcccagtctggggagtctgggcccggaagggccacggg

SEQ ID NO: 366 - DNA, 1390 bp, Propionibacterium acnes
  source 1..1390: mol_type = genomic DNA
tgcccagcgtttctcggcgatgtcgatcatgtcttggatggttttgacccatcctcggatgggatcgactttggtcagtttgatcccttcgaggaactcgatgggctgggtgatgggcccatctggtccggcttcggtgtcccagccttcgtcgatggctagtttcagttcggcggtatcgacccatgtttcgtgggtggtgccgggcacgttgggccaaaaccatcctgctcgtcctttggtgcgtttgaccggtagtaggccgatgtcgtcccaccaggatggcacggtgaagcggatgtggtagcgggccgggtgccaggggttgttggtgaacaggtcgcgggcttcggtggcgctgagcagagtggcgggtgcggcaccgatctctccggtcactgatccggcatacatgaatcggccgtcgatgtacacgaagttagggatagggccggcaggcacggtggggcgccagcccttttcgcggtcctcggggttgccgtcgtcgacgcatagttcgtagcggtgctgaggggaggtgtgttggatgagtgcgcccagttcggggtccatcggctccatgcgataggactcgggggtccgtagcttccagaggttgattccttctgctccggggcggtccatgagggcccagtcgcggtcgattctggtggcgatgatgtgggttaattcgcgccatgcccagcgggcctggattggggtgagggtctggccagggaaccattcatcagcgaccagaatgtcgaggttgcggtcggtttctttgtgggtgaaccggcctcgggcgggccgcccggacagcatgaacaggccccgcacgtgccagtcctggttgaactcgcgggtgtgagcgggggtgtcaggcagcagccaggattgaggctggtcggggatgttaccgcagacgatcaggcgtcgggcgttgtggtgtagcgcggttgttagcaggtctgacagggtcgcgtgcttggtgcgtcgtccccccagcactggcaggatctcgtttccggccgcgtcgactccccgggcggtgtcgatgtctagccacactgtttcggggtcggggggccgatgtggggcgggacggcgctgctcctggtcgtctctcatggtttcctcctttgggccagggagcggccggcgtcgagggcgttcatgcgctcgcgttgttcttcgcgtagttggtagacccggcctcgtgacactcctgctgcctcggcgatggtggtggccggcaggtggccgatggcggcagcgtcggcaaggacgtcacgccaggccaggtcaatggttcccagctgggctagagcttcgtcgcggcggcgggtggcatcagccactacggaggcccaccctgtggggtggatgg

SEQ ID NO: 367 - DNA, 1289 bp, Propionibacterium acnes
  source 1..1289: mol_type = genomic DNA
cttcgacgctctggccgagtgggccgagagcgatgaggcgacccacaccccgcaaaccagccccgtgttccggggcaaggacgccgcgcgcgccagccgcgcattcctcggccgaggacggcccaccctcggctcagaccacgccaccggcgagggccggtcgccccgccgtcaggtacggctcgacgcacgcaccaacgcgcgactcgacgcctacgcagccgcaaccggcaccagcgcctcccagatcatccgcgacgccctcgctgactacctgcccgcctgatcccaccccaatccactcgggcgcctgtcagtgccccccttctgggtggtggtccagggcgtcaccgccccggaccagttgggtagtcatctcagttgaaataagcgattagtgatacgcccctcatgctttccggtgctgtcatgagcgtctgacaacagcgacacctcggggcagccgacggacagtcctctggctgccgctctgatcccatgcccacggcacgaaggtgtcggacagctcggtctcgtcatgtgcccaaatagcgtcgtgggcctgtcgccaagcttctcgggagccccacacgggcacgaccgggccacaccggtgtcctggtctccagtgtcgcgacactgtcgatttcggtacgtgcaatgcggcggcggtttgacggatcgacatcccagactcccgcgcgtcccagatcgccatgtggagagtatttgcctccagtgcggccgccacacttgcacgctctcgcgcacgctcgaatgcccgcctagtgctctcaaatgtcgtcacgacgcctccccctgaaaatactcagggtgtcccacggtgggacaccctgagtatttcataccccaactcgcctcaccacacgtcgacctcgacaccgatcaagcgacccgtatcagcgacattgccgtaacgctgccccgcctggtcctccagccacgacaacgcatcccgaaacagcccgacgtcttccaaagctaaaccacagtcgtagccgcccttgtcccccaaccgcacaatctggcgctcccggtggcctccctcgtcgacctcgatccacagtttcgcgtgcatccgctggcctcggccctctgacaggatctcggtgagcaggtcggacgcctgccctcgcgcatcctcgttactgcgggggaattggagtatgtgggaggaacggtggtggggcaggtttgtgacctcgtgacgcagcaggttgcgcttgtgcatctgccgttcgagacgctcgggctgacctgttgacggg

SEQ ID NO: 368 - DNA, 1226 bp, Propionibacterium acnes
  source 1..1226: mol_type = genomic DNA
ccgagccagtaaccaggaacgaggacgataggccgatgctggtcaggtcgcgatgttgaagtcatggagacatagttgcacagtgcgcggacaagggagtggcactatttctggcatgaatttagatctgggtgtccggtgaggcgatcagaacgcctccatgtactgtccgagtgtctacgatgcagcggacacagtcgagcagctggctcacaagtttccaggtgtccttctgcccctatgagggaagtcggctgctctcgcaacctttgagggctgctctggggtcggaaccagttacagatcgttcaagttccgggaactaccgccggtcacgctgattgattcccgggcgatctcgcttctgacgacagtggtcggtaaccgagaggcgtcctactctgaccccgctgctgcggtgagtaaatcacgggcgtcccggatccggccacccgtccaagtgccagccagcttgatcggctaggcatcgtcaaggagcgacgatgaggtgatgatgcgatgtgagcgcaccgcgaagtgaggtataaagaagccttcccgggcgcatgcgtcgcccaggaaggccaggttggcccctggacggctgaatggttgggcggatcaggctgtagcggagacgtgcagtacctcgtaggcgatggcgttggttggggtctggtctgcatcgtggctactgagttcgacgaggatgacggtccaggtggtgatgtcgacggcggtgacgcgggcgatggtggaatcagtggatgctgcaaggaagtcggcggttatgtcttcgatgcagtgggacggagcagtgctggtgggcaggggcacggtcttgacggtcaggcttcgggcagcagagtaatcggcggttccgttaacaagctggtggacggtccagtcctggatcgggtgccggccgaagtcgcgtacgatagccgagtaaccaagttcgccccagcagaactggcgcatcccctctatgtcgcgccagacgtagaagggcgcgtaggagttctggggtgcgcctttgaccttttcttggatgaggtaggccttgaactccagtccatggtagccgtccatgaggtgtccagtctggatgacgcggtcgcggatgatctgcatgtcatagtcggtgggcagggtgatctgatattgcatggcgtacatcagcggttctccttggtttcgtgggagtaggtcgtgggggtgacggg

SEQ ID NO: 369 - DNA, 1269 bp, Propionibacterium acnes
  source 1..1269: mol_type = genomic DNA
tagaccctctgctgagggcttcatcaagatccatcacgaccttattagtgtcggcgtgtcgggtaacgcgatggcgttgttcgtcgcgttacgtaaccagcccggctgtgatcagtggacccgtcactcgtacctgcggctagcccaatggtgcggctgggatgggctgtcggaggcggcgggctgtaagcgggtgcagcgggccgctgctgagctcgctagcggtggttggctggaatcgcgggtcggccatgatcgtcgcaccgctaagacgctggtgtggcatcggttgaccagccccgacaccgaccgctgggagcaattgccgcggattgtgtgggcgaggatctgccagatcgccggggagacgtcgggagagtgggtgaggcattggctggtgtggcggatgctggccggtcgtactggtgtggctcaggcccctacgtccatcgtggcccggttcctgggctgttcttcgcgccaggtctctcatatccgtggggctctcgttgatgccggtctgctcggctgtgacgaggtctcgggggcggcgagccgggtgtggttcccctcgatggccgaggagtgtgcagcggatcgtgaggtggtcgatggggccgtcgtcgatgctgaggtgggctctggtgaaggtgtcgaggagggcggggaacccctgtcgattttgtccacccacccctgtcgattttgtccacccacccctgtcgattttgtccgccaagtattagacaaaccattagacagtgaattagaccctgggtcgcgtcagcgtgtgaactcaccaacgcgcgcgcgcgcggcggccgagccgccgaagccaaagaaacccataccaccaacgcctgaaccagcagcccccgcttcagacagtcctgtgtcagcgcacgctgatgaggctgccgagttggcgtggcagttcgtggggtggtgtcctcagctggtaggggcaccgaagaaggtgcgtggccagctccgccagatggtcgctgccgagatccgccggaatccgggctggctggatgcgccagcgttggaggttgttgcccagcgggtacgtgctgaaggtgcgctgggggtccagcactgtgagattgtgcgagccgagctgcacggggtgatcgccgaccagaaggccgcccccgcccgccccgacgccctgcacgcgcgggagcccaagtggtgggacgacgtgtactacgaaggaaacacaaccgtgtggtacgactctgacgaaaccagtgacgacgacga

SEQ ID NO: 370 - DNA, 1195 bp, Propionibacterium acnes
  source 1..1195: mol_type = genomic DNA
gaacgccaccgtgttgcctttctgatcctgagtgtcggcatgcaaatcgaggtaggccagcgactgcaacggggagcctgtgaccacagccaacgggatgccggtggtacggcccaaccggtactcaaccaccgggatagatgcggcgaacgcggaggcgtgagtcagctgacggtaggcgttaagcgaggaggagaaccggccaccgggccgggcagcccacagcaagtcctcctgacggcccacgggacgcacccacgtgaagtcaccgaacaccggatcattgacgaacgctcctgccagctcctcggtggtctcaaagtcaggagacgagacagtgacggtgataagagcctggatctcgacctcacgctcatcggcggccagctcggcgttgtagtcgacgagcacctgagcggaatgctcgatagacatgagggtcgaagcctgggtcatctcaccgccctcgacgttgtcgagctgatcgaccgtttgacggatagcccgctgatttttctgcatcgcagcgtgacgggtccgggccactccccggatcgccacgtcgaccggcacgccagtgtcgtcgatacggcccaaaaactcgtaggcaggccacgtcatcgtgcggggcaccttacccagcacgatatgggactggtagacggtctcgccggtgtcggcaccgattttgaggacgcgacgattccacgcctgagccgtccgggacatgtgggagactcgcttgtcatcctcgctggccagcaggtcggaggtcgcggcctcatcgatgaccaactcccccagcgcggcacgtccaacctcatccatgagggcgattccctcgccaggggcatcatcacgcaaccgggtcgggtggcctgacaggtgctgccgaagccagatctgttcatcaacggtgaccgggcggggttggaacgctgccggcagtttcgcaccgaattccttagcctgacggagggcccactcccgtgcgacacggccaggagcggtggtcatgagtccggcggcttcggtgattttgttgagggcggcggtccaggcggtgtgggtgcgtattttctggtcttggttgagtttgatcgataggaaccacacgcgccggcctagggattcggtttcaggctggtcgagggtggcgtcgatttcgtcggcccacacggggtgttcgctcagg

SEQ ID NO: 371 - DNA, 1199 bp, Propionibacterium acnes
  source 1..1199: mol_type = genomic DNA
acccttccagcccagcaccacccactacaccgacacgatccacgaagctgaaaccgaacctcccatccccgtccgaaacatcaacgaactcatcaaccccaccaaccatgcatgaacgcacgatcgcctaccggccagccttcctgcgcgacgtgaagcggctcaaaaacaagcactacaacatgaacacacactcaaatgggcggtaaggtcacgaagtcgacgtggctgcctcacggatggcttcggcgagctcttggggtcgactccacatgggccagtggccggttggcagatccatcgcggtgaagttggtcaggtgcgcgacggcgctgaacatcggattgcctgctgcggccagctcgaggacctggacgctgggaatggagcagcagatcaacgtggttagtacatcatggcgagcgctattggacagcgcgacccgtgcccgggccacttgcgcgggttcaggaaccgcccgtgcccggaaccggtcaaggtgctcgttgctgaggccctctaaactggcctgcttgccgagagtatcgaagtcaggaagtggcagctcagctgtttcctcaggtagatctggtgcgaaggcacctccatcgctcatgggaccggagtccacccagacgatccgatggaccaactctgggtgcctgtctacaactaggctcaccggcccgttcgcgccactgtgtcccaccaggaccgcatcgccgcccatctcgtccaggatggctgagatggcgtcagcttggtcgtcgagcgtgcgcgtagtgcgctgggtgtcctccggatcgagacctggcagcgtcagccccacggctcgactgccagcagtgttcaataactcgactacctcgtcccaagcccaggctccgagccagtaaccaggaacgaggacgataggccgatgctggtcaggtcgcgatgttgaagtcatggagacatagttgcacagtgcgcggacaagggagtggcactatttctggcatgaatttagatctgggtgtccggtgaggcgatcagaacgcctccatgtactgtccgagtgtctaggatgcagcggacacagtcgagcagctggctcacaagtttccaggtgtccttctgcccctatgagggaagtcggctgctctcgcaacctttgagggctgctctggggtcggaaccagttacagatcgttcaagtt

SEQ ID NO: 372 - DNA, 813 bp, Propionibacterium acnes
  source 1..813: mol_type = genomic DNA
cgattttgtccacccacccctgtcgattttgtccgccaagtattagacaaaccattagacagtgaattagaccctgggtcgcgtcagcgtgttagctcaccaacgcgcgcgcgcgcggcggccgagccgccgaagccaaagaaacccataccaccaacgcctgaaccagcagcccccgcttcagacagtcctgtgtcagcgcacgctgatgaggctgccgagttggcgtggcagttcgtggggtggtgtcctcagctggtaggggcaccgaagaaggtgcgtggccagctccgtcagctggtcgctgccgagatccgccggaatccgggctggctggatgcgccagcgttggaggttgttgcccagcgggtacgtgctgaaggtgcgctgggggtccagcactgcgagattgtgcgagccgagctgcacggggtgatcgccgaccagaaggccgcccccgcccgccccgacgccctgcacgcgcgggagcccaagtggtgggacgacgtgtactacgaaggaaacacaaccgtgtggacgtacgactctgacgaaaccagtgacgacgacgaggcgtggaaccggtcgcaggtatgtcatgttgctgagcgtgacgacatggctggcgggattgctaccaacctgctggcctcccacgctgatgatccgatggcctggctgactcgccgtcaaaccatgctgatggctcgtttcccccacgcccagaacgaggtcaccgcgatgtgccaaatcgtgcgcaccgccctggaggccgacctggccgccggaacccggtgggaggaccgatgaggg

SEQ ID NO: 373 - DNA, 1204 bp, Propionibacterium acnes
  source 1..1204: mol_type = genomic DNA
ccggagtatctggacaaggccgtgctcactgcgttgtatcccgatgggttgcccttcgacgaggacaccgaggagccgggcgagaatgccgggcaggaggagcttgcgatgactggatgagcccgaacatggttgaaggccgccccgccaggcgaccttcaatcaatggtttcggttgtcagctgcagccacccttgccaggtgctgtggttcttctccagaggaggagggaccgccatgaagacccagaagatctagaagatccaaaagaaccggtttcggctgttgcttcggtcttcatggtagctgatagcccgcgtcgttggaagtgcgacgacgccgatcctcatcggtatcgcaccctgttccagggtcgagaatgtgaaggattaacaaccatgacaagtcatgagacgccctccctgagggcgtcatgaccgctttaattcaagctctgccgacagctgaactgtctgctggacctggtgctagcagtccagctagaccctctgctgagggcttcatcaagattcatcacgaccttattagtgcgggcgtgtcgggtaacgcgatggcgttgttcgtcgcgttacgtaaccagcccggctgtgatcagtggacccgtcactcgtacctgcggctagcccaatggtgcggctgggatgggctgtcggaggcggcgggctgtaagcgggtgcagcgggccgctgctgagctcgctagcggtggttggctggaatcgcgggtcggccatgatcgtcgcaccgctaagacgctggtgtggcatcggttgaccagccccgacaccgaccgctgggagcaattgccgcggattgtgtgggcgaggatctgccagatcgccggggagacgtcgggagagtgggggaggcattggctggtgtggcggatgctggccggtcgtactggtgtggctcaggcccctatgtccatcgtggctcggttcctgggctgttcttcgcgccaggtctctcatatccgtggggctctcgttgatgccggtctgctcggctgtgacgaggtctcgggggcggcgagccgggtgtggttcccctcgatggccgaggagtgtgcagcggatcgtgaggtggttgatggggccgtcgtcgatgctggggtgggctctggtgaaggtgtcgaggagggcggggaacccctgtcgattttgtccacccacccctgtcga

SEQ ID NO: 374 - DNA, 1288 bp, Propionibacterium acnes
  source 1..1288: mol_type = genomic DNA
ccgaactcaccgaagaccaccgcaaccgcctcgccagcctcgtcgaggctcttccccgcgtgtcagtcgccgcggtaacaaccagccccaccagcccagacgaatggtccctcaccctgacaggtgacccactagccgccgacgtggctcccctcggctggcacatccacccccaaaccctctcccccgacctgtacaaccgcatggttgaactactcgccaactccgccgccgcagactacgaacccgccagctggtggaaccacgacgccaacgacgagcccaccaccgaccccaccaacgaggaagaatctaccccgagcaggcgagcccgcccgaatatccgcctgaccaccctgaccggcggcatcgacctatccagcgtcgacatcgacgacatcatcgacgaagccaaccaggccctcgacaacaccgaccaggccaccaaccaggttcgtgtcgacaccgaccaacccggcaccgacacccccttccccatcgacgacatcgacccgctgagctccgaccatccggtcctatccatcatcggccaccccgacatcacaggtgccactggaaccgttgggcgctccccgtggcgctgccaacagttggccctctacatcgctgagcatccgggagcatcgggggcgactatcgccgatgatttggggctatcagcgtcgacggtgcgctcgattgctacacacctgcgacactggttgggagccgatgatgccggggtggcttacatgccggcggcgacgcgcggctaccggctcgatgagcggatcgtcacagatgtggacctgatcgacgctgctgtggccggggcaggcattaacaccgctgagacggccacactggtggccattttgaagctgggccgcggacgggtcttcgctggggttcctgactcggaacttcgccagttcagggcgtcgatgtaccacgtggaggcccgcatcgtcgatgctgccctccaagtgacagaccgggccctggaagccggggacctggggctggcccggtgggcgttgacccaagggctactggtgtctcccgatcatgaggacctggtcgccggttgtctgcgcaccgagtaccaggccggcaacatggacaaggtcgccgagctggtcgatcacctgtcggctaccgcacgccgactgggcgtcgacctcaacgaggacaccacccggatcatcgatacggtcacccacaccgacaggagagcgtcatgatctcccctgcactcatctccgtcaggaaggttcctatgcaccat

SEQ ID NO: 375 - DNA, 1239 bp, Propionibacterium acnes
  source 1..1239: mol_type = genomic DNA
aaaagaagaaacccaccaaccacgaaccatccgcaatatcgccggcgtaatccgacaacccctcatcacagtcaccaaggtcgtcgcgagcatccgagacgtcatcgtaagggccacccttgagcacctcgatgtacttgtcgtggcacttcgcatcaataatccggccatagttgagctgctgatgaaccggcgccacgaacgagtccacaatgatcgccgacagcttcggatccttcgagtctcccgtcgaggtcatgtcatcaggaatctcgacctcaccagcggtcgccgtcgcaggatcaaccgaactagtaatcatccgagacagcgccacaccgaactgctgggtgcgagccaacggagtagccaacgtcgtcgtatcgcctgcgaacttcgccaccggggccgccaagaaacccaacgccagcgccgcagcaatcgccgcacgcgcacccgtagcccacgccccagccgtacgtcccctcatcatcttgacgaccacgcccacaccggcgcacgtcgtcagcaacgtcaacaccgttccaccccagctgtccgctcccagcggggccaaaaccttgtcgtggatatcgttctgcaaccccaccagcgggccggtaatccacccgacccagctcatcgccacggtccagtccaacaaccggcacagcaacgcaatgaccatcaggtacgtgttccaacacataccaataatggaggcccacatagccttcaacggggccgtaacgccaccatcgtccatcgacatctggtactgaaacaagtgaataccgttggagtcagtcacattgaaaccgtcacccatccagcccagccccgggcccgacgccatagcaggcacactgctcagcgccaccaccaaaaccagcgtggtgacgatgatacggaaccaccgctccccggccccggggcggcgtggatgacggctcacgctgtctcccggtcgtgctcgggcgggttggagctggcggcttcgcggtggggagcgtaggcaggtctcagtagtcgaatttcaccgacgttgccgtgctgatcggcgtacaggccacaaccggggcctccggggttgagggcaatcttgaccaggtcagcgaactcttcaggggacgttttagggtccacgcccaggaactcgacacctttctgggcgaggttgatgttgtcgcacagcaacacgatgcgatgctgaatgaggttgcggacggtctcgttggg

SEQ ID NO: 376 - DNA, 1232 bp, Propionibacterium acnes
  misc_difference 28: note = a, c, t, g, unknown or other
  source 1..1232: mol_type = genomic DNA
gcatcgatatatctatgtatctgtctgnggttttttagagggcccactcccgtcgccccgggccgctcagcgataccgcaaggctgtgtgggatcagctgtgccgctctcccgacatggcagacagcaccctgcggactgactgacactgtggcgccgcggaggtctcccgcggcgtccgctggggcgagtgcgtgtctgtcatctcatcttttatcgtcatgtttccccttgtcagaggggtctttgcaaagtgacaacgtcaggggtcttgacgacaacatcctcgacaacatcgtggcggtggtctgtgtcttgtcagttcaacgcaccggggaaagaggcaccgctgatgttcaccaccacaaacaccctcaacgatgaatgggaccagattcgcgccatcgagatcgattggcatgactgccctgaactgatgcactgcatcgacgttgatgatgtgttggccgtcattcctgccgcccccgacgccatcttgggctacctcattgcccgggctcagggcggtgacgagttggccacccgcactatcatccaagcgttcacaggcaagcttattttgatggccacggccaccaaggtgcgccgtactaatgacggcttcaatgatctgttggcgggtctgtgggagacgatcatcacttacccgttggatcgtcgccctgacaagatcgctgcgaacctcatcctcgacacgttgcaccgggttacccggttttggcgtgctgattcccccgatgaggaagaggctcacggtctggtgcccttccctgacactctcatcgccccagagcccgatgaggacgtcacagctagccaggccatcgccttggcggtggaccgcaactggattaccgaggacctagcccgcctcatgagccatatttactgtgacggtatgactggagctgatgcgggtcgtctgcatggctgcgctccagctacggtgcggtctcgatgccgtgatggtcgggccgtgttgcagcgcaacgccgagacgatcctggccgtctgctgatccctctcttgctcatgcctgccgccaccctacccctacctgctagaaacatagccatgtctccagcaacgcatctagcatatcttctagcaatttatctagctatgtatatagctgatgatctagctatcatatagctgtgtctccagcccaaaatgacagcccaatggcatgcttgccacaggaaggtgcgt

SEQ ID NO: 377 - DNA, 1200 bp, Propionibacterium acnes
  source 1..1200: mol_type = genomic DNA
ccggagtatctggacaaggccgtgctcactgcgttgtatcccgatgggttgcccttcgacgaggacaccgaggagccgggcgagaatgccgggcaggaggagcttgcgatgactggatgagcccgaacatggttgaaggccgccccgccaggcgaccttcaatcaatggtttcggttgtcagctgcagccacccttgccaggtgctgtggttcttctccagaggaggagggaccgccatgaagacccagaagatctagaagatccaaaagaaccggtttcggctgttgcttcggtcttcatggtagctgatagcccgcgtcgttggaagtgcgacgacgccgatcctcatcggtatcgcaccctgaaacagggtgttgaacatgaaggattaacaaccatgacaagtcatgaggcgtcctcccggagggcgtcatgaccgctttaattcaagctctgccgacagctgaactgtctgctggacctggtgctagcagtccagctagaccctctgctgagggcttcatcaagattcatcacgaccttattagtgcgggcgtgtcggggaacgcgatggcgttgttcgtcgcgttacgtaaccagcccggctgtgatcagtggacccgtcactcgtacctgcggctagcccaatggtgcggctgggatgggctgtcggaggcggcgggctgtaagcgggtgcagcgggccgctgctgagctcgctagcggtggttggctggaatcgcgggtcggccatgatcgtcgcaccgctaagacgctggtgtggcatcggttgaccagccccgacaccgaccgctgggagcaattgccgcggattgtgtgggcgaggatctgccagatcgccggggagacgtcgggagagtgggtgaggcattggctggtgtggcggatgctggccggtcgtactggtgtggctcaggcccctacgtccatcgtggcccggttcctgggctgttcttcgcgccaggtctctcatatccgtggggctctcgttgatgccggtctgctcggctgtgacgaggtgtcgggggcggcgagccgggtgtggttcccctcgatggccgaggagtgtgcagcggatcgtgaggtggtcgatggggccgtcgtcggtgctggggtgggctctggtgaaggtgtcgaggagggcggggaacccctgtcgattttgtccacccacccctg

SEQ ID NO: 378 - DNA, 1271 bp, Propionibacterium acnes
  source 1..1271: mol_type = genomic DNA
gttgagggcgtgggatcagggtgaaggcagccaaactggccgggatgaggatgacggccgcgccgacacttcggagcgaggtcatgtgacgatccttcggtagctcgacgggttgccgtagatcttttccacgttgatgccactatgtgggttgtcggcgctaaccatttggcctccaccgatgtagacggccacgtggtgggcagggcttccccagaggatgaggtcgccgactttgagctggtcacgggccacggcagtgccgactttctgctggtcggcggcggtgcggggaaggctaatgccgatacgccggtacagcgccgaggtcaggcctgagcagtcgtagccgccatcggctttgccgttgccaccccacacgtaggcgtaggagttgttgtcggcgatcgatttggcccatgccacggcttcggccaggttcttcgacacaccggtctcgttagcggccccggtggcacagttgtttgacaggttccctgtagtagtggatcccactatttgtttggccatggtttcccatttggcgtaggcatcgggcagggctgagccttgcactgcctgagctgcctgcgtcagcggcatcttctgccagtcagcgatgtcgactaaaccgggaatgtggaatccagggccgccggccgatccggggccagcgtaggtgatggtgtggcctttcaagaacgcttcggtggcgtaggcatcattgttgatctgatccagagtcccgtaccagcccggcaggatgcgctgctgaaaggggccagcgtcgccgtcaccgttaggtttcgtggaggtggggtcggctccgagatctgattcttgtttggcggtcatgatagcgatgaccgctgcctgggtaggcagtttgtcacgctggaccacagtgacgatggtggtcacgagctgcttctgtctggcggtgaggcctccggcgccgaccccgccgccggtgacagttcccatgcaggcatccccgccagcgcctccaccagagttatcgtcgagggccccagagcctactgacagcagcggcacaatgatcacggtcgctggcaagaccgccaggcccgccagcatcagaactgctgcactcaccacggcgatcacgtgagatgctttcaacgctgcccacctctcgctggtttgagggggcgacgcctgctggtacgcacaggcttggttgatccagtccgccgttgattggcaggcctgggtttgatcggcttgctgggacccggtttgggctccgg

SEQ ID NO: 379 - DNA, 1100 bp, Propionibacterium acnes
  source 1..1100: mol_type = genomic DNA
aggcgagccagacgggcaataagcgcgtagagggctcggccaaacaccttgtgcgggggcagctgccgaaacaaatgttctgacagcatctcctcggcgttaggaagagcgatgccacaagtgccaatgatgaggatgtcggcactcaggtcggcgggaggaaggtccgggtcaaagatggccgaagctagggaggccgagttctcgatgtcagcgaacacggcaatcctgtcagcgatcgcggtggcctcgggaaggtcgcactcctcggccaggtggcgggccaaacgcccacacgaggtgatctggtggtcacgcatgtaggccggtttgaggaccttggccagcgtggtcccggccacaccgatggtctccaagttaagcaaggtcagcaagaacgactgggcgacctgcccggccatctccgggggaaggatgcgcagcgggtccagcgacagcttggggtgggccgtgtcgacgatctggcgtctaaccccgtcgatagagttgacaaaggttacccactcccgctcatcggagttgtcggtggcaataatgcgcccgccccgggccgcgatggctgcgcacagccgcttctcggccatcgtcttgcccgcgcccatcttgccgatgaacgccaccgtgttgcctttctgatcctgagtgtcggcatgcaaatcgaggtaggccagcgactgcaacggggagcctgtgaccacagccaacgggatgccggtggtacggcccaaccggtactcaaccaccgggatagatgcggcgaacgcggaggcgtgagtcagctgacggtaggcgttaagcgaggaggagaaccggccaccgggccgggcagcccacagcaagtcctcctgacggcccacgggacgcacccacgtgaagtcaccgaacaccggatcattgacgaacgctcctgccagctcctcggtggtctcaaagtcaggagacgagacagtgacggtgataagagcctggatctcgacctcacgctcatcggcggccagctcggcgttgtagtcgacgagcacctgagcggaatgctcgatagacatgagggtcgaagcctgggtcatctcaccgccctc

SEQ ID NO: 380 - DNA, 1109 bp, Propionibacterium acnes
  source 1..1109: mol_type = genomic DNA
cccctaggtcctgatgtgggtcgaggtccttggaatgatggaagttcctacacacccatcgccaaagacctcaacatggacaacgctaccttcaccactccctcatctgtgaagagccagtttatgcacggtgttgaaagaggcgtcggtctacgacgaatgcgggttaatggtcttgcggtgtggggcgctgggcgatggcatcgagaacgcgtgagtgggtggcgatccattcggccgcgtcggggttgatgttgcgggcgacggtgtcgatcgctgttacgtagtgggcaagcctgcgaatctcagcttgttggtcagggtgatcgctgatgagaggctcttgatgggaggcgcggttacggacgtggcggatgagctccacgttttcctcgaagtcgcgtcggctacgccccgggtagtgaggcatacctccgttacgtaagtcagtgagagctttccatacggttgcttccaggcgcggggtgagcagaaagcgccagttgtccagtgacagactcgccacgatctgatcaggggtcgcatcgagcctcgcgcgccgcagtcgcttctcggccctggcgacgttacgcgggaaaccaccgagccgatagctcggggattcccaccaacgccgtatgccagtatcggcgctcaggcgcacgtcaatgaagtttctcaggagtacctcgacatggctgatgtcttccaagaacgctttcgagatgcgggtgttccacacgtaccacgcatcgactggttcgatccggtagcggctgagcctggcgggtgagaaccactcctgcaacgtctcacgactcaccgtgggagcgtggtaggattgatgacgataggcctcgggaaggtcaatgccgcgaaatatcggtatacccccgaggtcattgttttgcccaggcccctcctcgcatacttgcggggcgtcattggctgccgtcatctcgtctcttcccggtacgtggctgtccatgttcacgggcaggtacggcaatgaggttcccgcacacaaacctctaccaagcatacgctggcaagccccgacgagacgacgcctccgcccgccacaccaacggtcaccgccccggccacgg

SEQ ID NO: 381 - DNA, 1033 bp, Propionibacterium acnes
  source 1..1033: mol_type = genomic DNA
ccacggtgacctgccacaggctcggatcagacggggagacggtagcgtcataggcggtgacggtggtgggcgctggaccaggtttgcggggcatgcgcgcatcggtgatcttggccgccaccaggtgttccagattgtccaagtgcccggagtcagaggtcagcagaagagtagtcacctcgaccgcggtggctgaggcgatctgagctgtgcggcggtcgtgatgggtggtgtcagtgctgacagctgtggtgggagcggatgccggggccgccgaacggaccagggcaacggggccgcatgcgactccgcacagcacgagggcaaggaagcctttggtggccatcgatccggtgtggggccagggacccacgttttcctgtgcctgttttttcttggccgaccaacggcgggacttagggttagcggatgcaccttctggggtgcatgctcgtctcaatcgcatcggtcacctccttcactggatgaagggaccaaggaggtgaccgatgtgcggtcgaacccgaaaaagttcaaacttttttctgggtctgcctcaagtacgacagaaggcctgcatcatcacggcgttgtggtagcagatcttgcgtcagcgcaaatgtatgggcctcgtaggagtagctcttaggtgggtcccggtggttgcggccagggcgagggtgtcgggtatgtgtagcgctagtcccgggttcgtggtgtgagggcttttgggtgctgacatgcactacccattgctagacgctgtgctgtggcatggctggacgtctagcagacgggttgacatcacctttaggctggcagcgcccgaggccgcaggccagaggaagcggacagcctaacgattgacgtccccctctcctttccccaacctcctggagtcgatgacccggagatagatcgatgtctatgcatctgtgcatcgatatacctatgtatctgtctgtggtttttagaggccactcccgtcgccccgggccgctcagcgataccgcaaggctgtgtgggatcagct

SEQ ID NO: 382 - DNA, 1171 bp, Propionibacterium acnes
  source 1..1171: mol_type = genomic DNA
ccagcccgacagccatgccagaggtgaccaggtccagtcgatgcgaccaacaacgaactgggcgagccatccggcagccagcgcgaaaatgaaaccgcggatggtcatgcccccgtcgataattttgaagcccatcatcgcggcaggaactacgccgccgacagcgagcacctgatagatcgtgtagggcccgccaggaatccttcgacctgaggagtccttgccgataatgcggggctgctggcgggcctcggtgtgccactgaatatccacgatcagctcttgcccaatccttgcatcatctgtccgaagaattggatcgcgttaccttcgataagccagtgcgccataccacacacaaacagcatggagacgatcttggccaggctcataccgtgtttgaagatgttgaacgcggcaatgcccacgactacgaccatggcgacggctcgcaccgcggactgaccttcacctgccttgatcgtcgtccattcgaagaggttctgcgattccagtggcagcaggaggaattgatcgagcatgagaggttttcctttcaggaagccgaccgggatggtcccggtactgacgggctggacggcacgggtgtgccggccaggggcagaaggcgtgacggctggtcgagggaggcaacctcccagcggcctgcacggctgacaagagtcaggccgtactggctgggccgggtagtggattcgtcaccggttagctggcatgtcacggtcaccgtgacggtaatcttctgccggtctgagggggtggggacctcgtcaggtcccaccacatgagtggttttcactgatacgcatggggctgggtcaaccgcggtgaaagcggtccccgggctactccatctcgacaggtcgtcgctgccactcagcatcgcggccaagaaacccgaagaggtctgggcagccgggtcagcaggacgaatctccgaggagtccacgtcgggggctgaggccggtgcaggcatggggatctgcccaggtagacgcaaggcgatggccttgccgttggaatcgacgtggaccgggactgaccaggcctgtccgctcccggattggccgcccatggtgaccacggtgacctgccacaggctcggatcagacggggagacggtagcgtcataggcggtgacgggggtggg

SEQ ID NO: 383 - DNA, 1042 bp, Propionibacterium acnes
  source 1..1042: mol_type = genomic DNA
attatcggcgcgacaaccttactgatgacgctgttggttacgccgtagagcacatcttgtactcgtgggcgctcgacgatgctgatgatcctcgttgctggatgatgattcgtgttgacccagctggcctcctcatggagctagttatcctcatctacgacgatggctatgaactcctgatccacgccatgaaagcccgccctcagtatctgagctacttcgctatctagtgttgttgggcgagttgaactcaacttttctccgacgcaagcgccaataaaaggctgatccatccgaataccaccaaacacggctgaagtgtggaacagattcagcaagacagggtgcggtgctcgggtgcgttggggagatgaggatattcaggcttctggcgggatgtggcttgatgacgtccaggatcaccggttcggttttgaaggtgccttgcattaatgtcgacagggtcgtacgactcgaggattggatcgaccagcccgttgcgtctgaagaacttcatccaccccggtggagctccggccgcgtactggtgcaacggatcattagcatgggtagcgtgagtatgccttcgatcgtggtcagtgctgtcatcatccaagattctgacgggcggcttctcactgtccgtaaacgaggcaccgaggcattcatgctgccaggcggcaagccggagcccggcgaggactcgcgtcaggcagtagtccgggaagtgcacgaagagctcggcgtcgcattgtcttccgacgacctgcgtcgggtgggagtgttcaccacgcgagcagcgaatgaggccggccatcaggtggtggcgacgattttcacccacaccccggttgcggtgagtgagccagctgctgagatcgagcagattcgttggctcgattggagtgtcgacgccctgcctgacgacctggccccgctgctggtcgaggcagtcatcccgtggctgcggcgccgtatccggtcggtcgctgtattcacgggtgcgaaggatggaaccgaccctcattatcgtgtcgaagca

SEQ ID NO: 384 - DNA, 1057 bp, Propionibacterium acnes
  source 1..1057: mol_type = genomic DNA
cccctaggtcctgatgtgggtcgaggtccttggaatgatggaagttcctacacacccatcgccaaagacctcaacatggacaacgctaccttcaccactccctcatctgtgaagagccagtttatgcacggtgttgaaagaggcgtcggtctacgacgaatgcgggttaatggtcttgcggtgtggggcgctgggcgatggcatcgagaacgcgtgagtgggtggcgatccattcggccgcgtcggggttgatgttgcgggcgacggtgtcgatcgctgttacgtagtgggcaagcctgcgaatctcagcttgttggtcagggtgagcgctgatgagaggctcttgatgggaggcgcggttacggacgtggcggatgagctccacgttttcctcgaagtcgcgtcggctacgccccgggtagtgaggcatacctccgttacgtaagtcagtgagagctttccatacggttgcttccaggcgcggggtgagcagaaagcgccagttgtccagtgacagactcgccacgatctgatcaggggtcgcatcgagcctcgcgcgccgcagtcgcttctcggccctggcgacgttacgcgggaaaccaccgagccgatagctcggggattcccaccaacgccgtatgccagtatcggcgctcaggcgcacgtcaatgaagtttctcaggagtacctcgacatggctgatgtcttccaagaacgctttcgagatgcgggtgttccacacgtaccacgcatcgactggttcgatccggtagcgtctgagcctggcgggtgagaaccactcctgcaacgtctcacgactcaccgtgggagcgtggtaggattgatgacgataggcctcgggaaggtcaatgccgcgaaatatcggtatacccccgaggtcattgttttgcccaggcccctcctcgcatacttgcggggcgtcattggctgccgtcatctcgtctcttcccggtacgtggctgtccatgttcacgggcaggtacggcaatgaggttcccgcacacaaacctctaccaagcatacgctggcaagcccc

SEQ ID NO: 385 - DNA, 1057 bp, Propionibacterium acnes
  source 1..1057: mol_type = genomic DNA
cccctaggtcctgatgtgggtcgaggtccttggaatgatggaagttcctacacacccatcgccaaagacctcaacatggacaacgctaccttcaccactccctcatccgtgaagagccagtttatgcacggtgttgaaagaggcgtcggtctacgacgaatgcgggttaatggtcttgcggtgtggggcgctgggcgatggcatcgagaacgcgtgagtgggtggcgatccattcggccgcgtcggggttgatgttgcgggcgacggtgtcgatcgctgttacgtagtgggcaagcctgcgaatctcagcttgttggtcagggtgatcgctgatgagaggctcttgatgggaggcgcggttacggacgtggcggatgagctccacgttttcctcgaagtcgcgtcggctacgccccgggtagtgaggcatacctccgttacgtaagtcagtgagagctttccatacggttgcttccaggcgcggggtgagcagaaagcgccagttgtccagtgacagactcgccacgatctgatcaggggtcgcatcgagcctcgcgcgccgcagtcgcttctcggccctggcgacgttacgcgggaaaccaccgagccgatagctcggggattcccaccaacgccgtatgccagtatcggcgctcaggcgcacgtcaatgaagtttctcaggagtacctcgacatggctgatgtcttccaagaacgctttcgagatgcgggtgttccacacgtaccacgcatcgactggttcgatccggtagcggctgagcctggcgggtgagaaccactcctgcaacgtctcacgactcaccgtgggagcgtggtaggattgatgacgataggcctcgggaaggtcaatgccgcgaaatatcggtatacccccgaggccattgttttgcccaggcccctcctcgcatacttgcggggcgtcattggctgccgtcatctcgtctcttcccggtacgtggctgtccatgttcacgggcaggtacggcaatgaggttcccgcacacaaacctctaccaagcatacgctggcaagcccc

SEQ ID NO: 386 - DNA, 1052 bp, Propionibacterium acnes
  source 1..1052: mol_type = genomic DNA
cggggcggccgtagcagtccaagcggcccgccaggcactatctgctgccggggtggacgggtcggtgcaggaggacgggtcgaccatcacggtgaccacgtctcaaagtcggccgacagtgttcctgtcagcgatcggaatcagccaggtaagggggcatgggcaggcccatgctcagcttgtgggaccgggagaacgcccatgacagtgatacgtcgtatcggtgccctggtggcactgcttgtggtgatagccggcttaccggccgggctcgtggccgcaggcgccccgctagtaccctcgggcctgtcatgggcccatgtgcggcatctgttggttaccccagacatgaccgggtctgtgctggtgtggctggtcagcctcatcggctggatcgggtgggcatggttcgccctggccgtcgcagccgaagcggtgacgatgctctcagggcagcggctgcactggcacatgcccggccctcgcctagtgcgccgagtggcagccggtcttctcattgccgcgttcgcggccgcaccggcagccacaagcacggctcacgccgccgaggccacccatgtggcggtcgccgcccaggctggaccggcacacgcggcccccgcccaggacagccccgccaccacctctcaggccccggacgcctccaccactccgaaaatctggaagacctacacggtgcgggccaacgactacctgtggaagatcgccgagcactactacggtgacggcgcccaattccgtcgtatcgccgaagcctccggtatcgacccgcactcagagctgaaagtcggccagaaactggtgctaccggttcccgagaacacggccgcagttcattcggttaaagcgggggagtatctgtgggagatcgccgagcactactacggtgacggtgcccagtaccataaaatcgctgaagcttccggtatcgatgcccattccgatctagccgtgggccaaaaactcgtcatccccgggcccctccgccacgacgccacgccgccacaccactcggcgtcgacccacgcgaa

SEQ ID NO: 387 - DNA, 1057 bp, Propionibacterium acnes
  source 1..1057: mol_type = genomic DNA
cccctaggtcctgatgtgggtcgaggtccttggaatgatggaagttcctacacacccatcgccaaagacctcaacatggacaacgctaccttcaccactccctcatccgtgaagagccagtttatgcacggtgttgaaagaggcgtcggtctacgacgaatgcgggttaatggtcttgcggtgtggggcgctgggcgatggcatcgagaacgcgtgagtgggtggcgatccattcggccgcgtcggggttgatgttgcgggcgacggtgtcgatcgctgttacgtagtgggcaagcctgcgaatctcagcttgttggtcagggtgatcgctgatgagaggctcttgatgggaggcgcggttacggacgtggcggatgagctccacgttttcctcgaagtcgcgtcggctacgccccgggtagtgaggcatacctccgttacgtaagtcagtgagagctttccatacggttgcttccaggcgcggggtgagcagaaagcgccagttgtccagtgacagactcgccacgatctgatcaggggtcgcatcgagcctcgcgcgccgcagtcgcttctcggccctggcgacgttacgcgggaaaccaccgagccgatagctcggggattcccaccaacgccgtatgccagtatcggcgctcaggcgcacgtcaatgaagtttctcaggagtacctcgacatggctgatgtcttccaagaacgctttcgagatgcgggtgttccacacgtaccacgcatcgactggttcgatccggtagcggctgagcctggcgggtgagaaccactcctgcaacgtctcacgactcaccgtgggagcgtggtaggattgatgacgataggcctcgggaaggtcaatgccgcgaaatatcggtatacccccgaggccattgtcttgcccaggcccctcctcgcatacttgcggggcgtcattggctgccgtcatctcgtctcttcccggtacgtggctgtccatgttcacgggcaggtacggcaatgaggttcccgcacacaaacctctaccaagcatacgctggcaagcccc

SEQ ID NO: 388 - DNA, 1057 bp, Propionibacterium acnes; identical to SEQ ID NO: 387
  source 1..1057: mol_type = genomic DNA

SEQ ID NO: 389 - DNA, 1057 bp, Propionibacterium acnes; identical to SEQ ID NO: 387
  source 1..1057: mol_type = genomic DNA

SEQ ID NO: 390 - DNA, 1057 bp, Propionibacterium acnes; identical to SEQ ID NO: 387
  source 1..1057: mol_type = genomic DNA

SEQ ID NO: 391 - DNA, 1055 bp, Propionibacterium acnes; identical to SEQ ID NO: 149
  source 1..1055: mol_type = genomic DNA

SEQ ID NO: 392 - DNA, 1055 bp, Propionibacterium acnes; identical to SEQ ID NO: 149
  source 1..1055: mol_type = genomic DNA

SEQ ID NO: 393 - DNA, 1057 bp, Propionibacterium acnes
  source 1..1057: mol_type = genomic DNA
cccctaggtcctgatgtgggtcgaggtccttggaatgatggaagttcctacacacccatcgccaaagacctcaacatggacaacgctaccttcaccactccctcatctgtgaagagccagtttatgcacggtgttgaaagaggcgtcggtctacgacgaatgcgggttaatggtcttgcggtgtggggcgctgggcgatggcatcgagaacgcgtgagtgggtggcgatccattcggccgcgtcggggttgatgttgcgggcgacggtgtcgatcgctgttacgtagtgggcaagcctgcgaatctcagcttgttggtcagggtgagcgctgatgaggggctcttgatgggaggcgcggttacggacgtggcggatgagctccacgttttcctcgaagtcgcgtcggctacgccccgggtagtgaggcatacctccgttacgtaagtcagtgagagctttccatacggttgcttccaggcgcggggtgagcagaaagcgccagttgtccagtgacagactcgccacgatctgatcaggggtcgcatcgagcctcgcgcgccgcagtcgcttctcggccctgtcgacgttacgcgggaaaccaccgagccgatagctcggggattcccaccaacgccgtatgccagtatcggcgctcaggcgcacgtcaatgaagtttctcaggagtacctcgacatggctgatgtcttccaagaacgctttcgagatgcgggtgttccacacgtaccacgcatcgactggttcgatccggtagcggctgagcctggcgggtgagaaccactcctgcaacgtctcacgactcaccgtgggagcgtggtaggattgatgacgataggcctcgggaaggtcaatgccgcgaaatatcggtatacccccgaggccattgttttgcccaggcccctcctcgcatacttgcggggcgtcattggctgccgtcatctcgtctcttcccggtacgtggctgtccatgttcacgggcaggtacggcaatgaggttcccgcacacaaacctctaccaagcatacgctggcaagcccc

SEQ ID NO: 394 - DNA, 1057 bp, Propionibacterium acnes; identical to SEQ ID NO: 393
  source 1..1057: mol_type = genomic DNA

SEQ ID NO: 395 - DNA, 1057 bp, Propionibacterium acnes; identical to SEQ ID NO: 155
  source 1..1057: mol_type = genomic DNA

SEQ ID NO: 396 - DNA, 1057 bp, Propionibacterium acnes; identical to SEQ ID NO: 393
  source 1..1057: mol_type = genomic DNA

SEQ ID NO: 397 - DNA, 1055 bp, Propionibacterium acnes; identical to SEQ ID NO: 151
  source 1..1055: mol_type = genomic DNA

SEQ ID NO: 398 - DNA, 1003 bp, Propionibacterium acnes
  source 1..1003: mol_type = genomic DNA
ccagtcctggatcgggtgccggccgaagtcgcgtacgatagccgagtaaccaagttcgccccagcagaactggcgcatcccctctatgtcgcgccagacgtagaagggcgcgtaggagttctggggtgcgcctttgaccttttcttggatgaggtaggccttgaactccagtccatggtagccgtccatgaggtgtccagtctggatgacgcggtcgcggatgatctgcatgtcatagtcggtgggcagggtgatctgatattgcatggcgtacatcagcggttctccttggtttcgtgggagtaggtcgtgggggtgacgggttcctgccaatcgatggttgacaagtcgttggcggcttgttggtaggtaaggtggatcattggctgtttgagtgcagcgccatgccagtgtctctggccggcgtcgatccagatggattcgcccttggtcaggtgctggggtgcttgtccttcaatatggaccagggcaacgccgcccgtgacgtagaggccctgtcccttggggtgtgtgcctcagcggcaaacgtgacggcgtgggcggcacgcccggcgtcttccgtggcacgatcggccggatccatggcggcgcgcagctgctgttctgcagccaggcgtccaggtcacggcgggcagcatcgacacccagggcagcctcgacggcttcagggctacgacgctggccgggctggttgaccgcagaccactggtgccgggcgtcgtccagatcatggccggcggcgtcgatgagggcggtggtggcttcggcgcagcatcgcctgatccactccgaacgtgacaggccagctgtctcggcggcactgtcaatgcgcgccaggagagatttcatgggcgctcatctgtagcctccagataggcgttgatgtagcgcagagcctgatccgtcatgtcgatggcggctgcctcggcagacgacacaacgggctgtggatgataagaccacccaacatagacggcgaaca

SEQ ID NO: 399 - DNA, 1017 bp, Propionibacterium acnes
  source 1..1017: mol_type = genomic DNA
ctgggacccggtttgggctccggagtcttaggctccggcttcacatgcctaggcacttcggctgcggtgggaggagtcagcacgtggcgtaccggcttggtgaccttctgggcacccgaaacaaccggcttagacaccaccttggcacctttgaccaccggtgcggctgccttcgcgccggccttcttgactgcacgatgcgctttgatagccccggcctcggcccggccaaccctactagcagtagcatcgagggctctgtggcccgtcgttgccctcaccggtgcatccttgccctggcgggtctgcttcgcgatcgccgacatgccgcctcgcaatgccgaaacatgattgtgggcgtgggcgatcgccgacatgccggccgtcgcgatttttgactggccctgcggggcccctgccccagcacgaatctgccggtaagccgccgacgtgccacgagcacccgccgccattcgcgccaccttcgcagccctagtcactcccgtcgacacgccacccgtggctaccgcagcagcacccgagaccacagtcgaggccatccgccttcgacccgatccggtgagcttgcgaccaccactgcgcaccatccggcgagcaccccgcccagcccactggccgatcaccgagcccctttcggaacgcttgctgcgcatccaatcgttgatcttgtccctcagccccttctcgcccttgtgacgacgccacatggacatcaagaacccgataatccccacgagctcgagcatgttgacaaccatgaccttgatggcgacatcaccgtcagaggcgaaaaccgacttgatgatgagcatgaccacacccaacatcaccatcgacccgacaatgccgatcatcgagtacaagatcgaacacagatcccggatgagcggatctgtgcggccagggatagcccgcaacacgttgagcatcgacataaacgccgaccacaccaacttgcacacgtagaaccagcacatgcccgcgaacaccagcagg

SEQ ID NO: 400 - DNA, 1108 bp, Propionibacterium acnes
  source 1..1108: mol_type = genomic DNA
ccccaatgcccccacaacgatcagcacaccaacagcgatcatcaggtgggcagcactaactgatcccaacgaaccaagatcaaacaagccctgcccgggagcgtcgagcagtccgtgggcgcgaagccatgctccgagattgccaatgatcttggggaccatcttgttcagtagggctatccctccgatgccgacaacgaggaagacgaggatttcttcgcctgcgttgtttcttcctgtgtttgcggtcatgctgccttctcggggtggatggccagccagctgatgaggttgtcggtgatctgccctgagatttggatcagttcgacttgcccggcctgccatgcccgcgatgtgccggcaagcaatgatgctgggacccctactgcgcggccacgggatgcaacctcagccaaggcggcgcgtaactcctcgacggtgctttcgatgtaccaactgccgtcagtactagtctcagcggcatcggtggtagcgataagagcatcggtgaggtcgtcgacggcgcggtccagatcagcgatgtccggtagggctacagcagtcatggtgtgtcttccttctagggtgccttcactggtgaagggtccctagccccggccgatgtgcggtgctgtgggaaaaatgcttcccattggtccgtcttagttaggaaacttggcctaagtgctgtcgagagtcgcgtgttcgtgaccggttcgaagacactgccgctttgccttcttgcccgtggcgcttccgagatgggttcagtgggcgatggctaggccgatgagggcgccgctgcacaggctgggtgcccaggggaggaatcgggtggtgtggtgtcggaaccggtcgatgagggcatatagggcgatcagggtgaggccggctatgaccgtggcgtggatcgtgtcgatgccggttgctgcggccggggctgcccacagtggtgtgatgcgcacgtcggagaagccgaagccgcctcgggagatgagccaggcgatcatccacgctgcgaagatgatggtggtagcgatgacagcacgtgttgccgcagtctggtccgagagggcggtaacggctacagccccgatccatccggccc

SEQ ID NO: 401 - DNA, 1004 bp, Propionibacterium acnes
  source 1..1004: mol_type = genomic DNA
tgggttcagatttcgaatgtgggaggggtttgtggatgggtatcggtgtcctcggcgagggcttggtcgagcaggcaggtggccggggtgtcggtagtctcgtccagctcgtcgatcatctcgtcgaggaagttgggggtggtggatgcggcccacacaggtgggatagccggtgcgggtcgaggcggtgtggggaggcggagtttggtttggccccagaggggtgtgtgggtcatgccggcgggagtggtggcggcgtgagtggtcacacgccaccagcccgccagccatgccagaggtgaccaggtccagtcgatgcgaccaacaacgaactgggcgagccatccggcagccagcgcgaaaatgaaaccgcggatggtcatgcccccgtcgataattttgaagcccatcatcgcggcaggaactacgccgccgacagcgagcacctgatagatcgtgtagggcccgccaggaatccttcgacctgaggaatccttaccgataatgcggggctgctggcgggcctcggtgtgccactgaatatccacgatcagctcttgcccaatccttgcatcatctgtccgaagaattggatcgcgttaccttcgataagccagtgcgccataccacacacaaacagcatggagacgatcttggccaggctcataccgtgtttgaagatgttgaacgcggcaatgcccacgactacgaccatggcgacggctcgcaccgcggactgaccttcacctgccttgatcgtcgtccattcgaagaggttctgcgattccagtggcagcaggaggaattgatcgagcatgagaggttttcctttcaggaagccgaccgggatggtcccggtactgacgggctggacggcacgggtgtgccggccaggggcagaaggcgtgacggctggtcgagggaggcaacctcccagcggcctgcacggctgacaagagtcaggccgtactggctggtccgggtagtggattcgtcgccggtgg

SEQ ID NO: 402 - DNA, 988 bp, Propionibacterium acnes
  source 1..988: mol_type = genomic DNA
cgttgccctcaccggtgcatccttgccctggcgggtctgcttagcgatcgccgacatgccgcctcgcaatgccgaaacatgattgtgggcgtgggcgatcgccgacatgccggccgtcgcgatttttgactggccctgcggggcccctgccccagcacgaatctgctggtaagccgccgacgtgccacgagcacccgccgccattcgcgccaccttcgcagccctagtcactcccgtcgacacgccacccgtggctaccgcagcagcacccgagaccacagtcgaggccatccgccttcgacccaatccggtgagcttgcgaccaccgctgcgcaccatccggcgagcaccccgcccagcccactggccgatcaccgagcccctttcggaacgcttgctgcgcatccaatcgttgatcttgtccctcagccccttctcgcccttgtgacgacgccacatggacatcaagaacccgataatccccacgagctcgagcatgttgacaaccatgaccttgatggcgacatcaccgtcagaggcgaaaaccgacttgatgatgagcatgaccacacccaacatcaccatcgacccgacaatgccgatcatcgagtacaagatcgaacacagatcccggatgagcggatctgtgcggccagggatagcccgcaacacgttgagcatcgacatgaacgccgaccacaccaacttgcacacgtagaaccagcacatgcccgcgaacaccagcaggaccacagccaaacccgccaccgtcgacgagtaaaagaagaaccccaccaaccacgaaccatccgcaatatcgccggcgtaatccgacaacccctcatcacagtcaccaaggtcgtcgcgagcatccgagacgtcatcgtaagggccacccttgagcacctcgatgtacttgtcgtggcacttcgcatcaataatgcggccatagttgagctgctgatgaaccggcgccacgaacgagtcc

SEQ ID NO: 403 - DNA, 1053 bp, Propionibacterium acnes
  source 1..1053: mol_type = genomic DNA
cgattttgtccacccacccctgtcgattttgtccgccaagtattagacaaaccattagacagtgaattagaccctgggtcgcgtcagcgtgttagctcaccaacgcgcgcgcgcgcggcggccgagccgccgaagccaaagaaacccataccaccaacgcctgaaccagcagcccccgcttcagacagtcctgtgtcagcgcacgctgatgaggctgccgagttggcgtggcggttcgtggggtggtgtcctcagctggtaggggcaccgaagaaggtgcgtggccagctccgtcagctggtcgctgccgagatccgccggaatccgggctggctggatgcgccagcgttggaggttgttgcccagcgggtacgtgctgaaggtgcgctgggggtccagcactgcgagattgtgcgagccgagctgcacggggtgatcgccgaccagaaggccgcccccgcccgccccgacgccctgcacgcgcgggagcccaagtggtgggacgacgtgtactacgaaggaaacacaaccgtgtggtacgactctgacgaaaccagtgacgacgacgaggcgtggaaccggtcgcaggtatgtcatgttgctgagcgtgacgacatggctggcgggattgctaccaacctgctggcctcccacgctgatgatccgatggcctggctgactcgccgtcaaaccatgctgatggctcgtttcccccacgcccagaacgaggtcatcgcgatgtgccacatcgtgcgcaccgccctggaggccgacatggccgccggaacccggtgggaggactgatgagggtctcccggcgcgccctcatggccgtggcccgtgccgacgctgccgcagcagaccatgccaccggccgatgggtggccacagccaacgccaccgtcgcccggctgaccggactgtgcgaacgcaccgtccaatacgcccgcgccaccctggtccacctgggcctgtgccgcgtcgtggccaccggccgctacctcaccgccgacgagcggcgcacggctgctcgcacccatggcggccgccaga

SEQ ID NO: 404 - DNA, 1009 bp, Propionibacterium acnes
  source 1..1009: mol_type = genomic DNA
gcgagccacgaccatcgccaagctgaatggagagcgagcatgagcaccacccctgccgggttcgacttcgacgctctggccgagtgggccgagagcgatgaggcgacccacaccccgcaaaccagccccgtgttccggggcaaggacgccgcgcgcgccagccgcgcattcctcggccgaggacggcccaccctcggcgcggaccacgccaccggcgagggccggtcgccccgccgtcaggtacggctcgacgcacgcaccaacgcgcgactcgacgcctacgcagccgcaaccggcaccagcgcctcccagatcatccgcgacgccctcgctgactacctgcccgcctgatcccaccccaatccactcgggcgcctgtcagtgccccctcttctgggtggtggtccggggcgtcaccgccccggaccagttgggtagtcatctcagttgaaataagcgattagtgatacgcccctcctgctttccggtgctgtcatgagcgtctgacaacagcgacacctcggggcagccgacggacagtcctctggctgccgctctgatcccatgcccacggcacgaaggtgtcggacagctcggtctcatcatgtgcccaaatagcgtcgtgggcctgtcgccaagcttctcgggagccccacacgggcacgaccgggccacaccggtgtcctggtctccagtgtcgcgacactgtcgatttcggtacgtgcaatgcggcggcggtttgacggatcgacatcccagactcccgcgcgtcccagatcgccatgtggagagtatttgcctccagtgcggccgccacacttgcacgctctcgcgcacgctcgaatgcccgcctagtgctctcaaatgtcgtcacgacgcctccccctgaaaatactcagggtgtcccacggtgggacaccctgagtatttcataccccaactcgcctcaccacacgtcgacctcgacaccgatcaagcgacccgtatcggcgacattgccgtactgctg

SEQ ID NO: 405 - DNA, 1029 bp, Propionibacterium acnes
  source 1..1029: mol_type = genomic DNA
caggtgggtttgaccgccagcgtcggattggtgctggtcgctgggctgatcaccactctcaaccgtcgttaccggacccggttcacccgtcagccccgcggcaaggccatgaccctgcccagcccggacgcccaaactgccgagatagcgctgcgcagcaccggggcgactgacactctgacgatcacctgcctcgaccaggcgctccgcgcgatcggcgcatggtgccaccactgcgggcacccgctgccacccctgctggccgcccgcgtcgatgacgaccggatcgacctgctgctatcccaggcggcccccgaccatcccgaggcggtggagctggccgccgacggatcggtgtggaccctcaccgccgaccggatcgacgacctgctagcccacaccgatgacaaccaagcggctccgtggccgtctctggtcacactgggacgcgacgacgacggcgcccacatcctcatcgacttggaagccgcaggaaccttgcacctgatcgccgatgacgaccaggtcgacgcggccctcgccgcgatcgccgtggaactggccacctgcgactggtccgacgaagtcaacgtcaccctcgtcggccaggtgtgcccgggcctagaagacgcactagagtctccgaccctgacccgcgccaccgacgtggacaccctcctcaccaccctagaagctcgcgccgacgaccagcgacacatcctcaccgaaggaaaccccctcgccgctcaccgagccgaccccgccatctccgacgggttcgacgccgaagtgatcctcctcgacaccaaactcaccgaagaccaccgcaaccgcctcgccagcctcgtcgaggctcttccccgcgtgtcagtcgccgcggtaacaaccagccccaccagcccagacgaatggtccctcaccctgacaggtgacccactagccgccgacctggctcccctcggctggcacatccacccccaaaccctctcccccgacctgtacaaccgcgtggttgaactgctcgccaac

SEQ ID NO: 406 - DNA, 1024 bp, Propionibacterium acnes
  source 1..1024: mol_type = genomic DNA
ccagcaggaccacagccaaacccgccaccgtcgacgagtaaaagaagaaccccaccaaccacgaaccatccgcaatatcgccggcgtaatccgacaacccctcatcacagtcaccaaggtcgtcgcgagcatccgagacgtcatcgtaagggccacccttgagcacctcgatgtacttgtcgtggcacttcgcatcaataatccggccatagttgagctgctgatgaaccggcgccacgaacgagtccacaatgatcgccgacagcttcggatccttcgagtctcccgtcgaggtcatgtcatcaggaatctcgacctcaccagcggtcgccgtcgcaggatcaaccgaactagtaatcatccgagacagcgccacaccgaactgctgggtgcgagccaacggagtagccaacgtcgtcgtatcgcctgcgaacttcgccaccggggccgccaagaaacccaacgccagcgccgcagcaatcgccgcacgcgcacccgtagcccacgccccagccgtacgtcccctcatcatcttgacgaccacgcccacaccggcgcacgtcgtcagcaacgccaacaccgttccaccccagctgtccgctcccagcggggccaaaaccttgtcgtggatgtcgttctgcaaccccaccagcggtccggtaatccacccgacccagctcatcgccacggtccagtccaacaaccggcacaacagggcaacgaccatcaggtacgtgttccaacacatgccaataatggaggcccacatagccttcagcggggccgtaacgccaccatcgtccatcgacatctggtactgaaacaagtgaataccgttggagtcagtcacattgaaaccgtcacccatccagcccagcccaggacccgacgccatggcaggcacactgctcagcgccaccaccagaaccagcgtggtgacgatgatacggaaccgccgctccccggccccggggcggcgtggatgacggctcacgctgtctcccggtcgtgctcgggcgggttg

SEQ ID NO: 407 - DNA, 985 bp, Propionibacterium acnes
  source 1..985: mol_type = genomic DNA
tccctgcgaccagtgaaccgtgcccccactgcgcccacaatgatcagcacacccacggcgatcatcaggtgggcagcactaactgatcccaacgaaccaagatcaaacaagccctgcccgggagcgtcgagcagtccgtgggcgcgaagccatgctccgagattgccaatgatcttggggatcatcttgttcagtagggctatccctccgatgccgacaacgaggaagacgaggatttcttcgcctgcgttgtttcttcctgtgtttgcggtcatgctgccttctcggggtggatggccagccagctgatgaggttgtcggtgatctgccctgagatttggatcagttcgacttgcccggcctgccatgcccgcgatgtgccggccagcaatgatgctgggacccctactgcgcggccacgggatgcaacctcagccaaggcggcgcgtaactcctcgacggtgctttcgatgtaccaactgccgtcagtactagtctcagcggcatcggtggtagcgataagagcatcggtgaggtcgtcgacggcgcggtccagatcagcgatgtccggtagggctacaggagtcatggtgtgtcttccttctagggtgccttcactggtgaagggtccctagccccggccgatgtgcggtgctgtgggaaaaatgcttcccattggtccgtcttagttaggaaacttggcctaagtgctgtcgagggtcgcgtgttcgtgaccggttcgaagacactgccgccttgtcttcttgcccgtggcgcttccgagatggtcagtgggcgatggctaggccgatgagggcgccgctgcacaggctgggcgcccagggaaggaatcgggtggtgtggtgtcggaaccggtcgattagggcatatagggcgatcagggtgaggccggctatgaccgtggcgtggatcgtgtcgatgccggttgctgcgaccggggctgcccacagtggtgtgatgcgca

SEQ ID NO: 408 - DNA, 967 bp, Propionibacterium acnes
  source 1..967: mol_type = genomic DNA
ggtgggcgctggaccaggtttgcggggcatgcgcgcatcggtgatcttggccgccaccaggtgttccagattgtccaagtgcccggagtcagaggtcagcagaagagtagtcacctcgaccgcggtggctgaggcgatctgagctgtgcggcggtcgtgatgggtggtgtcagtgctgacagctgtggtgggagcggatgccggggccgccgaacggaccagggcaacggggccgcatgcgactccgcacagcacgagggcaaggaagcctttggtggccatcgatccggtgtggggccagggacccacgttttcctgtgcctgttttttcttggccgaccaacggcgggacttagggttagcggatgcaccttctggggtgcatgctcgtctcaatcgcatcggtcacctccttcactggatgaagggaccaaggaggtgaccgatgtgcggtcgaacccgaaaaagttcaaacttttttctgggtctgcctcaagtacgacagaaggcctgcatcatcacggcgttgtggtagcagatcttgcgtcagcgcaaatgtatgggcctcgtaggagtagctcttaggtgggtcccggtggttgcggccagggcgagggtgtcgggtatgtgtagcgctagtcccgggttcgtggtgtgagggcttttgggtgctgacatgcactacccattgctagacgctgtgctgtggcatggctggacgtctagcagacgggttgacatcacctttaggctggcagcgcccgaggccgcaggccagaggaagcggacagcctaacgattgacgtccccctctcctttccccaacctcctggagtcgatgacccggagatagatcgatgtctatgcatcggtgcatcgatatacctatgtatctgtctgtggtttttagaggccactcccgtcgccccgggccgctcagcgataccgcaaggctgtgtgggatcag

SEQ ID NO: 409 - DNA, 1055 bp, Propionibacterium acnes; identical to SEQ ID NO: 159
  source 1..1055: mol_type = genomic DNA

SEQ ID NO: 410 - DNA, 997 bp, Propionibacterium acnes
  source 1..997: mol_type = genomic DNA
cgctcctgccagctcctcggtggtctcaaagtcaggagacgagacagtgacggtgataagagcctggatctcgacctcacgctcatcggcggccagctcggcgttgtagtcgacgagcacctgagcggaatgctcgatagacatgagggtcgaagcctgggtcatctcaccgccctcgacgttgtcgagctggtcgacggtttggcggatggcccgctgatttttctgcatcgcagcgtgacgggtccgggccactccccggatcgccacgtcgaccggcacgccagtgtcgtcgatacggcccaggaactcgtaggcaggccacgtcatcgtgcggggcaccttgcccagcgcaatgtgggactggtagacggtctcgccggtgtcggcaccgattttgaggacgcgacgattccacgcctgagccgtccgggacatgtgggagactcgcttgtcatcctcgctggccagcaggtcggaggtcgcggcctcatcgatgaccaactcccccagcgcggcacgtccaacctcatccatgagggcgattccctcgccaggggcatcatcacgcaaccgggtcgggtggcctgacaggtgctgccgaagccagatctgttcatcaacggtgaccgggcggggttggaacgctgccggcagtttcgcaccgaattccttagcctgacggagggcccactcccgtgcgacacggccaggagcggtggtcatgagtccggcggcttcggtgattttgttgagggcggcggtccaggcggtgtgggtgcgtattttctggtcttggttgagtttgatcgataggaaccacacgcgccggcctagggattcggtttcaggctggtcgagggtggcgtcgatttcgtcggcccacacggggtgttcgctcaggtcgaggccggcggccatggcgtcgacgatttctgcggggtcggtccaggtgagggctccgttgaggcagaactcgtggcgggcgaggtggcgg

SEQ ID NO: 411 - DNA, 1162 bp, Propionibacterium acnes
  source 1..1162: mol_type = genomic DNA
cccatcgtttacatcctcgactggtccctgcgaccagtgaaccgtgcccccactgcgcccacaatgatcagcacacccacggcgatcatcaggtgggcagcactaactgatcccaacggaccaagatcaaacaagccctgcccgggagcgtcgagcagtccgtgggcgcgaagccatgctccgagatgaccgatgattttaggggccatcttcttcagcagggctatccctccgataccaacaacgatgaaggcgaggatttcttcgcatccgttgtttccttctccggtggggccgttcatgctgccttctcggggtggacggccagccagccgatgaggttgtcggcgatctgccctgagatttggatcagttcgacttgcccggcctgccatgcccgcgatgcgccggccagcaatgatgctgggacccctactgcgcggccacgggatgcaacctcagccaaggcggcgcgtaactcctcgacggtgctttcgatgtaccaactgccgtcagtactagtctcagcggcatcggtggtagcgataagagcatcggtgaggtcgtcgacggcgcggtccagatcagcgatgtccggtagggctacagcagtcatggtgtgtcttccttctagggtgccttcactggtgaagggtccctagccccggccgatgtgcggtgctgtgggaaaaatgcttcccattggtccgtcttagttaggaaacttggcctaagtgctgtcgagggtcgcgtgttcgtgaccggttcgaagacactgccgctttgccttcttgtcagtggcgtttccgagatggggtcagtgggcgatggctaggccgatgagggcgccgctgcacaggctgggtgcccaggggaggaatcgggtggtgtggtgtcggaaccggtcgattagggcatatagggcgatcagggtgaggccggctatgaccgtggcgtggatcgtgtcgatgccggttgctgcgaccggggctgcccacagtggtgtgatgcgcacgtcggagaagccgaagccgcctcgggagatgagccaggcgatcatccacgctgcgaagatgatggtggtagcgatgacagcacgtgttgccgcagtctggtccgagagggcggtaacggctacagccccgatccatccggcccatcc

SEQ ID NO: 412 - DNA, 933 bp, Propionibacterium acnes
  source 1..933: mol_type = genomic DNA
ccccgactaccagacccgccgtcgtgaacgcagggaaaccctgcgagccacactcagggccgcccagcagcatgtcaggacacactgatacccgctcatacacacaccatgaaacacgacaagccacctgacagtatcagctgcaagacgcatgacaacatagaaggacatgatgaaatacacatagacacaaccccgcacagcagtttcgcaacaaatcatgatagtctcatggcagtatcgcttgatacacacatagcatcactcccacataggcagttatgctgatatactcctactaggttatccgtccaacatgctgagtgggttcctgtacagcatgaaaggagcatggcatgatatgggccgttctcaactgcaagggtggtgtcggcaagacgaccagtgccctcctgctggcggcagccgccgccaagcagggccacaccaccctggtggccgacgctgacccccagggcaccgcatcccagtggtcagccctggcaaccaaaaacgacgaacccctgcccttcccggtgcaagcggtcaacatcgccaccatggaggcactgcccaccaccaccgacgcccatgatctcatcctcgttgacacacccccctcggcaggcgatctgatgttccaggcatgccgcatcgccgacctcatcatcatccccaccgccacctccggacccgacatctcccgaacatgggtcaccatggacgccacacaaggcacaccacgcgcgatcctcctcacccaaaccgaacacaaccgtgtcgtctaccgccaagctcgcactgccctcgccgccgacgacaccgtcgttctcctggaccacgacatcccccgccgtgaatccatccgcacagcatggggcaccaaccccccagacgacgtcatcacctactacctgcccgtcctcaacgaac

SEQ ID NO: 413 - DNA, 928 bp, Propionibacterium acnes
  source 1..928: mol_type = genomic DNA
gacgacgacgaggcgtggaaccggtcgcaggtatgtcatgttgctgagcgtgacgacatggctggcgggattgctaccaacctgctggcctcccacgctgatgatccgatggcctggctgactcgccgtcaaaccatgctgatggctcgtttcccccacgcccagaacgaggtcatcgcgatgtgccacatcgtgcgcaccgccctggaggccgacatggccgccggaacccggtgggaggactgatgagggtctcccggcgcgccctcatggccgtggcccgtgccgacgctgccgcagcagaccatgccaccggccgatgggtggccacagccaacgccaccgtcgcccggctgaccggactgtgcgaacgcaccgtccaatacgcccgcgccaccctggtccacctgggcctgtgccgcgtcgtggccaccggccgctacctcaccgccgacgagcggcgcacggctgctcgcacccatggcggccgccagatgcgcgccgcctccacccgcgtcctcaccatgtcctgcgcaatcgtttgcgccctaccccgaaggggtcaccactacaggaaagttaagttcctagatggtcaccaacgcacgcgcaggcgcgtgcgaaggccagcaacaccagagaagaaacccctgtggctgcaaaaactcgcagccctcctcgaccagcacctgccctggctggtgagaaaccatcacatcggccgactgtgccacgccctcaccgccctgggcatcgacgaacactggcaacccgcagacctcgacgccctcctcgacgccatgaaccgcaggaaccgtcgcctcggcctcgacgtgccatgcgccgacgaccagcacaaccccttgggactgttcatccatcaggcccgagacaccctcacccacgacaacccccatgaacgccgcct

SEQ ID NO: 414 - DNA, 957 bp, Propionibacterium acnes
  source 1..957: mol_type = genomic DNA
ggcagggtcgtcgggttcttcggttacctcgggtggggtcgatctggctgtctcggtgtcgtcggccaggtcggctcccaggatgcgttcccattcggggctggttttcttgcccgctgaggccatcgtctcgtcgatctgttcgtcagtgggccacacaaatttctttttggtccaggtcgtggtgtcgggtcgcagctgatccagcagttccaggtcttgcggggagtgggccttgcgggggtcgggggtgtagaagaattggacttccttgggggctgattcgccggataggtaggtgcctcggccgcgtttgccgaacgggatgcccacgccgacgtgttcggagccgaacatcatgcgggctccgtcagcggacaggggtccggtggcggcacgcccggagaagttgtctcggatttcgccgcccaggaactcggcgtcggggcgttgggtccccagatcgacgtggatacggcaggcggctgccatgcgcagcagggagccgatccagccgaaaacggggcattctccgggcatcccagagaccttgatcgttgaccaccagtttttcgcgttgccgtagaactggcggtactcgtcgatgaggaccagcacgcgggtgaagtcggtctcgcgggccccttcttcttcgatgcggcggtagcggtcctccatgagagaccacagccagtggatgagggcgacctggtcggggacggtagtggcgaccatctcgatgttgggccactcccgcaggcccaggtactcgatgcgtttagggtcgatgacgaagacgcgccagttgcggcgggcaccctcgacggcgtcgccgatcatggacaccgtttttccggtacgggtgcggccggccttgagctggtgggccatgacaccggagatgtcccagaaacaggtgttgccgtcctcgtcgacggcctgggggattttctccca

SEQ ID NO: 415 - DNA, 947 bp, Propionibacterium acnes
  source 1..947: mol_type = genomic DNA
ggctccggagtcttaggctccggcttcacatgcctaggcacttcggctgcggtgggaggagtcagcacgtggcgtaccggcttggtgaccttctgggcacccgaaacaaccggcttagacaccaccttggcacctttgaccaccggtgcggctgccttagcgccggccttcttgactgcacgatgcgctttgatagccccggcctcggcccggccaaccctactagcagtagcatcgagggctctgtggcccgtcgttgccctcaccggtgcatccttgccctggcgggtctgcttagcgatcgccgacataccgccccgcaatgccgaaacatgattgtgggcgtgggcgatcgccgacatgccggccgtcgcgatttttgactggccctgcggggcccctgccccagcacgaatctgccggtaagccgccgacgtgccacgagcacccgccgccattcgcgccaccttcgcagccctagtcactcccgtcgacacgccacccgtggctaccgcagcagcacccgagaccacagtcgaggccatccgccttcgacccaatccggtgagcttgcgaccaccactgcgcaccatccggcgagcaccccgcccagcccactggccgatcaccgagcccctttcggaacgcttgctgcgcatccaatcgttgatcttgtccctcagccccttctcgcccttgtgacgacgccacatggacatcaagaacccgataatccccacgagctcgagcatgttgacaaccatgaccttgatggcgacatcaccgtcagaggcgaaaaccgacttgatgatgagcatgaccacacccaacatcaccatcgacccgacaatgccgatcatcgagtacaagatcgaacacagatcccggatgagcggatctgtgcggccagggatagcccgcaacacgttgagcatcgacatgaacgc

SEQ ID NO: 416 - DNA, 926 bp, Propionibacterium acnes
  source 1..926: mol_type = genomic DNA
ccctgcgagccacactcagggccgcccagcagcatgtcaggacacactgatacccgctcatacacacaccatgaaacacgacaagccacctgacagtatcagctgcaagacgcatgacaacatagaaggatatgatgaaatacacatagacacaacccagcacagcagtttcgcaacaaatcatgatagtctcatggcagtatcgcttgatacacacatagcatcactcccacataggcagttatgctgatatactcctactaggttatccgtccaacatgctgagtgggttcctgtacagcatgaaaggagcatggcatgatatgggccgttctcaactgcaagggtggtgtcggcaagacgaccagtgccctcctgctggcggcagccgccgccaagcagggccacaccaccctggtggccgacgctgacccccagggcaccgcatcccagtggtcagccctggcaaccaaaaacgacgaacccctgcccttcccggtgcaagcggtcaacatcgccaccatggaggcactgcccaccaccaccgacgcccatgatctcatcctcgttgacacacccccctcggcaggcgatctgatgttccaggcatgccgcatcgccgacctcatcatcatccccaccgccacctccggacccgacatctcccgaacatgggtcaccatggacgccacacaaggcacaccacgcgcgatcctcctcacccaaaccgaacacaaccgtgtcgtctaccgccaagctcgcactgccctcgccgccgacgacaccgtcgttctcctggaccacgacatcccccgccgtgaatccatccgcacagcatggggcaccaaccccccagacgacgtcatcacctactacctgcccgtcctcaacgaactcatggaggccctgtcatgaccaccaagaaa

SEQ ID NO: 417 - DNA, 930 bp, Propionibacterium acnes
  source 1..930: mol_type = genomic DNA
ccggtttcggctgttgcttcggtcttcatggtagctgatagcccgcgtcgttggaagtgcgacgacgccgatcctcatcggtatcgcaccctgttccagggtcgagaatgtgaaggattaacaaccatgacaagtcatgagacgccctccctgagggcgtcatgaccgctttaattcaagctctgccgacagctgaactgtctgctggacctggtgctagcagtccagctagaccctctgctgagggcttcatcaagattcatcacgaccttattagtgcgggcgtgtcgggtaacgcgatggcgttgttcgtcgcgttacgtaaccagcccggctgtgatcagtggacccgtcactcgtacctgcggctagcccaatggtgcggctgggatgggctgtcggaggcggcgggctgtaagcgggtgcagcgggccgctgctgagctcgctagcggtggttggctggaatcgcgggtcggccatgatcgtcgcaccgctaagacgctggtgtggcatcggttgaccagccccgacaccgaccgctgggagcaattgccgcggattgtgtgggcgaggatctgccagatcgccggggagacgtcgggagagtgggtgaggcattggctggtgtggcggatgctggccggtcgtactggtgtggctcaggcccctatgtccatcgtggctcggttcctgggctgttcttcgcgccaggtctctcatatccgtggggctctcgttgatgccggtctgctcggctgtgacgaggtctcgggggcggcgagccgggtgtggttcccctcgatggccgaggagtgtgcagcggatcgtgaggtggttgatggggccgtcgtcgatgctggggtgggctctggtgaaggtgtcgaggagggcggggaacccctgtcgattttgtccacccacccctgtc

SEQ ID NO: 418 - DNA, 909 bp, Propionibacterium acnes
  source 1..909: mol_type = genomic DNA
aaccaggaacgaggacgataggccgatgctggtcaggtcgcgatgttgaagtcatggagacatatttgcacagtgcgcggacaagggagtggcactatttctggcatgaatttagatctgggtgtccggtgaggcgatcagaacgcctccatgtactgtccgagtgtctacgatgcagcggacacagtcgagcagctggctcacaagtttccaggtgtccttctgcccctatgagggaagtcggctgctctcgcaacctttgagggctgctctggggtcggaaccagttacagatcgttcaagttccgggaactaccgccggtcacgctgattgattcccgggcgatctcgcttctgacgacagtggtcggtgaccgagaggcgtcctactctgaccccgctgctgcggtgagtaaatcacgggcgtcccggatccggccacccgtccaagtgccagccagcttgatcggctaggcatcgtcaaggagcgacgatgaggtgatgatgcgatgtgagcgcaccgcgaagtgaggtataaagaagccttcccgggcgcatgcgtcgcccaggaaggccaggttggcccctggacggctgaatggttgggcggatcaggctgtagcggagacgtgcagtacctcgtaggcgatggcgttggttgggctctggtctgcatcgtggctactgagttcgacgaggatgacggtccaggtggtgatgtcgacggcggtgacgcgggcgatggtggaatcagtggatgctgcaaggaagtcggcggttatgtcttcgatgcagtgggacggagcagtgctggtgggcaggggcacggtcttgacggtcaggcttcgggcagcagagtaatcggcggttccgttaacaagctggtggacggtccagtcctggatcggg

SEQ ID NO: 419 - DNA, 939 bp, Propionibacterium acnes
  source 1..939: mol_type = genomic DNA
gtgacgacatggctggcgggattgctaccaacctgctggcctcccacgctgatgatccgatggcctggctgactcgccgtcaaaccatgctgatggctcgtttcccccacgcccagaacgaggtcatcgcgatgtgccacatcgtgcgcaccgccctggaggccgacatggccgccggaacccggtgggaggactgatgagggtctcccggcgcgccctcatggccgtggcccgtgccgacgctgccgcagcagaccatgccaccggccgatgggtggtcacagccaacgccaccgtcgcccggctgaccggactgtgcgaacgcaccgtccaatacgcccgcgccaccctggtccacctgggcctgtgccgcgtcgtggccaccggccgctacctcaccgccgacgagcggcgcacggctgctcgcacccatggcggccgccagatgcgcgccgcctccacccgcgtcctcaccatgtcctgcgcaatcgtttgcgccctaccccgaaggggtcaccactacaggaaagttaagttcctagatggtcaccaacgcacgcgcaggcgcgtgcgaaggccagcaacaccagagaagaaacccctgtggctgcaaaaactcgcagccctcctcgaccagcacctgccctggctggtgagaaaccatcacatcggccgactgtgccacgccctcaccgccctgggcatcgacgaacactggcaacccgcagacctcgacgccctcctcgacgccatgaaccgcaggaaccgtcgcctcggcctcgacgtgccatgcgccgacgaccagcacaaccccttgggactgttcatccaccaggcccgagacaccctcacccacgacaacccccatgaacgccgcctggcccgcgaacaccaccgcgcccaactcatcgacgaccaactccgccgccgcgcagaaac

SEQ ID NO: 420 - DNA, 967 bp, Propionibacterium acnes
  source 1..967: mol_type = genomic DNA
gacgccggccaccccaactactccgacccacacggtgaccccagctccggcctctgccggccactcgaccagcgacgagcacccaatccatacggataccgccacagcggacaaggccagcaacgaggacgccctgtccccaatccaggtgggcttgaccgccagcgtcggactggtgctggtcgccggactgatcaccaccctcaaccgccgctaccggacccggttcacccgccagccccgcggcaaggccatgaccctgcccagcccggacgcccaaactgccgagatagcgctgcgcagcaccagagcagccgagactctgacgatcacctgcctcgaccaggcgctccgcgcgatcggcgcatggtgccaccactgcgggcacccgctgccacccctgctggccgcccgcgtcgacgacgaccggatcgacctgctgctatcccaggcggcccccgaccatcccgaggcggtggagctggccgccgacggatcggtgtggaccctcaccgccgaccggatcgacgacctgctagcccacaccgatgacaaccaagcggctccgtggccagctctagtcacactgggacgcgacgacgacggcgcccacatcctcatcgacttggaagccgccggaaccttgcacctgatcgccgacgacgaccaggtcgacgcagccctcgccgcgatcgccgtggaactggccacctgcgactggtccgacgaagtcaacgtcaccctcgtcggccaggtgtgcccgggcctagaagacgcactagagtctccgaccctgacccgcgccaccgacgtggacgccctcctcaccaccctggaagctcgcgccgacgaccagcgacacatcctcaccgaaggaagccccctcgccgctcaccgagccgaccccgccatctccgacgggttcgacgccgaagtgatcctcctcgacaccgaactcaccgaagac

SEQ ID NO: 421 - DNA, 882 bp, Propionibacterium acnes
  source 1..882: mol_type = genomic DNA
ctctacggggccatcatcgccgcctccaccctggacccccacctcagcatcgacgccctagcccgcctctaccagctccccctcgacctcgtgacccaagccctcaccgtctaagcgtcgatgagcgggggagaggtagcgcactatcggctaaggaaccccacaaacaccaaacccttgtcactgggaagggtttggtgttatgctggtctcacaactcaacagaggaggtgagacatgggaaatgagtaccagaagtcgctcaaagtcctgttcaagaaactggaatctgagcaaggagcccgcatcgagacccggcgcaaaggatggatgatctacccgccggatacgtcacgatcagcggtcatgatccacaagactccatcagatcgcagagcatgggccaacatgctttccgaactgagacgctcaggattcaccgtctaactcagtgaagggggctggagctccagccccctttcaaccacctcccccggacaccacacaagaaaaggagaacatgatgtggcacgttcggttgtcgcttcgcgcaatcagcgaggacatgctgttcgacgccctggacaccctcgaccccttatccccggtggccacactgggccccgatgagcacaccggatcattggcggtgttcgtcgaggctgactcactgacagacgccatcgagactgcccgcacagccatcaccaacgcatgcaacaccgccaccataaccggcgtagaagcccgccccgaagacgaatgcttcgcagacgttgaccggcccctgttcccgccagtggtcggatacaccgaaatcgctgaaaccgcaggactctcacgtcagcgcatccgccagctcgcaggcaccgccgggttccc

SEQ ID NO: 422 - DNA, 880 bp, Propionibacterium acnes
  source 1..880: mol_type = genomic DNA
agttggtatgcccgcgataagaagggcaccgtcaagatgatcgcattcaactcaacggaggtccccacatgcgacgtcaagtaatcaccgcggccgtactgggcctggccctggccaccacctccctgcccgccctcgcaggcggcggcgacttgaacggcagtgtggacacggatggccctggttacgatgtgcgtactgaggtggattaccatcacaccaccggtggtgcgggtgggggtgccacgacagggggccatcatgggggcaaaacccacggtgatggtgaaggtgaggctattgatgggcgttctcgcgccgatgccgaagccgaactagacgaagccgaccgtaaccaggacttgacttgtgatgtcttgctcccaccggcgccgaataccccagccggccaggaatgggcgaaagaatgcaatcccccagcgaaaaaggggcagaaggccaccccgaagcccgatccggtgttagtgggccgtcacgcggccttgcagctcacccttcccggcgcggcccctcgtatcgatccgtcccccgaccttaaccggtggcactcggcagcagtgggccaggctttgtggttgtcggttgatgaccccaccgccactacgcagaaatcgatcacgtttatgggccaggttgtctcgttgagcgccaaacgtaacggtttgtcgtttgatatgggtgatggtcatgtcgtgcactgtgatgccacgacgacatggacggagtcggtggaaccggggaccccctcacccacgtgcggttacacctaccaacaggcagccccggccgggggctataaggtcaccgcaatcacgtcgtgggatgtgacctggtcggtactaggacacacgggcacagt

SEQ ID NO: 423 - DNA, 1061 bp, Propionibacterium acnes
  source 1..1061: mol_type = genomic DNA
gaaggttccctagacccggccgatgtgcggttctgtgggaaaaatgcttcccattggtccgtcttagttaggaaacttggcctaagtgctgtcgagggtcgcgtgttcgtgaccggttcgaagacactgccgccttgccttcttgcccgtggcgtttccgagatggggtcagtgggcgatggctaggccgatgagggcgccgctgcacaggctgggtgcccaggggaggaatcgggtggtgtggtgtcggcagcggtcgatgagggcatatagggcgatcagagtcagcccggctatgacagtgacctggatcgtgtcgatgccggttgctgcggccggggctgcccacagtggtgtgatgcgcacgtcggagaagccgaagccgcctcgggagatgagccaggcgatcatccacgctgcgaagatgatggcggtagcgatgacagcacgtatcgccgcagtatggtccgagagggcggtaacgactacagccccgatccatccggcccatccggtccacgctaggactgccggtatccatgtggtgatggcgtcaatgacggcaacccatgccccgatggtggctagcagggcccacgtcggccacgtgggtgctggggcccacattgtggcggcgatcatggtgaccgcagccgcggcacagaccgcgatcaagcttcggagactgtaggtgtcgcggtagacgatcttgtcggggctggcggtagctggttcgggcaggacgcgggtgagggcaggccatcctgcgaccgcaatagccgcgacggcgaccacccacacgatctgttgcatgggtctcatcatggcccatcatcgatgagtatgggtggccgacatggggtcactcgtagaggggatcgaggggtgtgcgggcgagcatggcttcctgtgtgccgagcatgagggtgccagaatcctcgccagccgattcccagtcgacgatgacctggtcgccgtcaacgctggattcggcgatggtcacccattgcccgtccatgtcgatgagcatcccggcggccagctctgtggcggcaaccggg

SEQ ID NO: 424 - DNA, 26620 bp, Propionibacterium acnes
  source 1..26620: mol_type = genomic DNA
ccttgtggacaccacgtcatccacatgacttgtgtcacatgattcccggaccatcatcaagcagatgctcacccaactgtaatgatttctgttctgaatctggacatgctctgacctgcattcaatgatcaattccgtgcgatattccacaacgcacggggaggtcgcagacaatgacaacagaaagcatccccacgcggctgctcgtgtggcacgagcagaccgatccgaccaagctcctcaggatcaccgacgcgatcaggaggggggatccccttccccccatcgaggccatggcgatcggccacagattcctcgtcctcgacggtgcgcaccgggcccaagcccaccagtactgccatcgatctgagatccgagcccgcctccacaacctccccctcagcgcggaaataccaggctggagccactccataccccgcgatgcagcagcgaaactggctcacctactcctccccgtggacgctctcggtcaggcggaaatcgtcctgcacggggtgcgccgtcaggtggggaccgcttcacaacgaccgcgcgacatctttctcgcctgccaccggatcgcgcgagttgcctacgcgcatggaatcagacctctcggcccggagttctccaacgctccgacgatcgacgccgccaccatgacctggcgcccgccgaacgtgggcacgttgtgggccatcgccagcagtctcggacccctgcccgcaactgtgacccggttcgccccgatcctccggcacgacgccatcggggattccgcgatgacacccgtcacctccgccgcgtgacgacccgcgccaattccgccccaccactggatgaggggcagccgcgtggacgatgctcctgttcaggcagggactccatacgagaccaataggaaaatcatgatcaaaaacacaagccctctgaccgtgaaaaatgtctcgaaaacattccgtggctccagcggagaagccatcaaggccgtgcaagacgtgtcattcaccgttgagcgtggtgaggttgtggcattcctcggcccgaacggcgccgggaagtccaccaccatcgacatggctctcggcctcacccgccccgacagcggccagatcgaggtcttcggtactgacccgctcagcgcggcccggtcgggacgctgcaccgcgatgacacagaccggcgggttgctgcccgacctcacgattgggcagaccatggagatcatctcctcgctctatcgtggctcccacatgaatgcctgcatggagcgagcaaggatcacgcatctggccgatcggcaggtgtcgatgtgctcgggaggcgagcgccaacgacttcgcttcgcactggctctgctgcccgatcctgacttcctcatcctcgacgagcccactgcggggatggatgtggaggcgcgccgggacttctgggcagagatccacgaggacacgcgtcgtggtcggacaattctgttcgcaacgcactacctcgacgaggtggacgagttcgccgatcgggtcatcctcatcaaggagggccgcgtcatcgccgacgacacctccgacgcgatccgcaccatgtcggggggttgcaccgttacggcgaccattcccgacttctccctggcacgactgaatctgccgggcacccaactcatcaagcagggcggcgcacgcgttgatctgcaccatcccgattccgatgccctcgcagcgcgagtcatccagctcggcggcaccgacctgcgcgtggtcccccgcagcctcgacgacgccttcctcgctctcacctcaaccaccaaggagtcctgacatgaccgcccaagcgcttcccgcagtcgccactcccaaggcccgccaccgatccgccatctcgctgaagtacttgtggtgcgagatgcgtcgccccttccggcgttcgacgatgctgttcaacctcgccctccccgcagttctgtacctggccctgttccgcaccgtccacaccgccgagctgccggacgggaacttcgcgatgtggatgatgatcggcatcgctgtctacggagcggccactgcgagcaccagctacgcagcctccatctccgtcgacgaggccaacgggtggacccgcaccatccgcctgacgccgttgtcgtcggtcgggtacgtgctggtgaaggtcctctgcgccatggccatcgccctggccccgaccctgctcatcggtctcatcgggctgttgaccggagctcacggcacgctgcgggtctgggtaatcggactgggggcggcttggctcagctcagcaatcttctccgccttcggcctggctctcggactgtccctgcgtcccgaggtcgtcatgcacgtccccggcctggtcatcaccggtctggcgttcctgggcaacgtcttcgtccccctcagcgggacgatgctcaccattggccgctggagccccgcctacggcatcaccgcgctggctcgttacccgctcaccaacggcatcgacatcgggggcggccacgactccctgacggctgccctcatcggcaccttctgctggttcgccggattcgtgttctgggcctcccgtcgatttaccaagagcacgggtcgtcagtgacagattcggccgatctccggaaggagcagtgttatgaccaagcccctcattgcagtggtcaccgcgggccaaggagcgcagaagcctcgcctgctcacgccatggctcaaggtccccggcgtcacggagaagcttgctgcatggtccgctcaggccgatgtggacctcgtcgagctcggtaccagggcgaatgcagaaaccttggcagcgaccgagaatgcgcagccactactggtctgtctcggagtcctcgtctcggatctcctggccgaccagaacattgtgctcgcaggacactccgtgggcgagctgacagcagcgtgtctcgccggggtagttgatcccgggacggccgtcactcttgcacgacggcgtggactggccatggcgcgggcctgcgctctccacccgaccaccatggcggccatcattggtgacaatccggatgacgtcctccggcggctctcggaactgggactcacggctgccaacatcaacggaggcggacagattgttgcggccggctccaccgacgcgatcgcggaactggtggcgacccctcccaacgggaccgcagtcaagccgttgcgagttgctggcgcctttcacaccaagtacatgacgcctgcgcaggacgctttcgcccaagctgctcaagacgtcaccttctccgacccgcagcacccgatcatctccaacctcgacgggcaggagatccggtccggcaatgacctgcgtgaacggctgattgcccaggtgaccgcgccagttcgatgggatctctgcatccagcagatcgcggatcgtcagccggaactcgccctatcggcccctccggggaaggtgcaggcgtcgctcttgtctcggcagatcccggacctcgcgacggtctgcatcaccacaccacgggaggcagcccaggctgcacagcggatcgaccagtccgtatccgtccttcagggggcatgatgctcatccccgagtacttcctcacagcctgttcggaccatgctgagcgcctggcgatcatcacccacaatgacgttgtgacgtgggccgaactggcgactcgcgtcgacggttttcggcgctggctgcgggaccatggcgtgcaccgccaggacagggtcgttctccagacgccaagcaccgtaggcacggtagccctcatgtgggcctgcctgctcgacggcgtgacgatggtcccggtgcaccaggacctcactgcctcccaggtgcagcaagtcatcgacgactgccgtccagctctggtgtgtggcagcccggacctcgtccaactcctcaactcccccggaatgaagacaagcacacctccaacgcggccggagtcaacgagtattctgccgtccttgtcccgggtcagccccgatgaccttgcgatgctcatctatacgtccggcacgacgggtctcccgaaggggatcatgtgtccccaccggcaggtcgccaccgccgcacggaccgtccatgactgtctcgggtaccgcacggacgacgtcattctctgtcgcctgccgttgtccttcgactacgggctctatcagattctgatgtctgccatctccggtagcgcggttgtcctgcgggacggaggcgcgcaggaccgcaacctggtgcgcgacatcgcccgtcacggcgtcactgtcgttccagtcgtgccgtccatggcgtcaatgctcatcaccctgcagcgtcgtgatcagttgccgaccatcgtcagactgttcacgaataccggggcgcgtctggcacccgagaccgcgaaccagttgctcgcaagcttccccggctcccgctatgcgtcgatgtatggcatgacggagtgcaagcgcatctccatccttccggtggaggagtacgagacgcatccggacagcgtgggaagagctctgcccagcactcacgtcgagatcgttgacgctcagggagttccggttccggcgggcgagcacggggagatcacggtgtccggcccgaccgtgatgaacggctactggcaggtgccgaacagtcccagtggacgattccgacccagcggccacggcctcactctgttcaccggtgatcgcggctggatggatgaggagggacgtctctacctcctcgggcgcgacgacgagatcgtcaagcatcacggcatccgaatcagcctgcaggagatcgagatagccgccgaagccgcgccgggcgtcgacgcagtcatcgctctcaagccggcctccgactcggcccccattgaaatcgcctactgcggcagcacgagtcccgagaacctggcccgccatctcgaaaccgtcctggaccgggcgcgacgaccccaattcatccaccaactccagcagatccccctgacccgtaacgggaaaccaaaccggtcagcagccgccgaggccatccgctcaagggcgtgacggcgaaggccaacacccacagacgaaaggaaaccaccatgacccaggccgagttcaaccagttcatcgagtccacctgctccgcgacgatcgtggatcccgaccgtcctttggtcgatcagggcatcgactccctcggaatgctcaccctcatggtcgctatcgaggacagcctcggcatcgaactggatcccgagtccctcgccgacggtaggggttccacgccctccggtcttctgtcccttgtcgagcagccgaaagcgacggtgtgacgacatgacgacgatggttccttgccgccgtgtggagatgccgcaactgttcgaccacatccccggaagcatctctctctcaggagggctgcccgatctgagcgtgctcccgagcaatcagatcgccgaactgacgtcccggatcatgcgtctcggctcaagaatcctcctgcaatactccaccccttcggtctcgtcctccttggtgccggccatcctggacctggcggaacgaacatgcatgtcaccggatccgcggaatctgatcccgaccgcgggttcccaactgggcctggccatggtgatcaatgcctttgacggcgatgagatcatctgtgactgcgccacctatcccggggcgctggccgccttcgcctctgccggcgtggaaacaacgggggtggccagtgacgaggaggggctcaacccagacgcgctcgctcacgccgtcgcagagggtcgggccaatggccgccgcatcgcagccgtctacaccacgcccaccttccagaatcccaccggctccgtacagtccgagaaccgccgtgcggccctgctcaaggtgtgtgctgacaatgacctcctcctcatcgaggacgatccgtacggcatgctgtccttcgacgggcagacgtggccagctctgaagtccatggacccacagcgcgtcatctacctgggcaccttctcgaaggtgttcgcaccgggcgtccgttccggctggatcgatccgcccgccaatcttgtcgagaaactccgcgctgtgtgcgagatcatgacactctcgccatcagccctcaaccaagcgatcatcggcgagtaccaccgtcgtcacggatgggacgaactgttggagggctatcgcgcctcctaccgcgaccgagcccgtctcctcatcggggctctcgaggctgaactggcaagaacgaattgcactggcacgtggacctggcgtgaaccacggggcggcttctacctgtggttggagaacgtcgccagcaccagcggtatcgacgttgcgcgtcgcgccgccgacaacggagtggccgtggtgcccgggaaacacttcgacgcagccggacacgattcgccgagcctgcgggtgtcgttcagcaattcacgcccggctgatctggtcgaaggagctcgtcgtctcgcccgtgcactggtgggagaggacgttcagaaatgactctcgcgacacgcaccgccaccgacaccctgcagcagaccttgccctggggcacccacgaacgtctcgtcttcgggcgggcgctcctgcgcagcaccggcttcccagccgaaggcttggccctgctcgactccgacgacatcctccccctcctcgactcctttcttgccggggacatcgacagaactcacttcgagaaggaatacaccagtcgcgaggagtccggcgcaagggcgctcatcaacgtcttgaaggacgatgcagtatcgcgcgccatcgcatggcagaaccccaccgcgtggaggtccttcgaatccctgtcgtccacgagcggaatcaatgcttcgactcggcgcaaggtacgccaactcgccctctactggcaacgttactgttccaaggctgagaccattggatacttcggcccgttcgcctgggccgaagtcgacccggaggcctctgcggtcgaattcatctcctccgaccatctgatcgaccgttcccacgtcgcaatggaggcgtgggcggtcattgagatcgggaaagccctggcatcacgggccgaccttcagtggtggatgccaccaatcctgtcccccgccgtcgacctcaacatggagagaggcaccgtgacggtggctggacaccagccacgacgggtccgggaggacgaggcacgagttctcttcctgaccgacggcacccgtcccgccgcccagatcgccaagagcctcgacatggagcccgagcggttgcgcaggatcctcgtggcccatgaacgtcgtcacaccgtgatctgggacgccaacatccctgtctcagtgcacgcgtgggacatcctgcacgaacgcattgcccagatcggagacgctgggctgcgagatgaggccactgctgttctcacgaggttcgacgagcttctggaggtcatccgcaacattcccgacgcccggtccctgacggaggcgacggaatccctgtcccgtcttttcgaaaccgtgacaggaacctcttcgaacagacgtgcgggccaggcatatgcagcccgcagcctgtgctacctggactgcacccgcgccggaaccgccaaggttgggacccggcttctcgaagccctcgacgcccccctcaacctcgtcctacaatccgctgactggttcgcggcgaccttggcaaaggaatacaccaccgaaatcacggacctcgcaaatcgaaagcagcgggcctcccaccagccactgaccatggctgatgtctggccgtccacgatgtcgctgttctggggggactcaccgtccccactgcagcgagccgtgaccgaactgtcacggcggtggagcagagtcctcgaggggctgcagccagtcgacggtcgcatcgacacgacatcgtccgctctctcgggcgccgtggacgagcagttccccgtgtgcaccccgattccagaactgtcagtgcacagcccggacctccaggtcatcacctcgagcactagcaacatcgcctccggacgagtcactgcagtcatgggtgagctacatgcctgtctgagcagtctcgacatgccgttgctcgagtggtcgctgccccatggttccattcgcgatcgcatcaacaccgcgctcaacctgcgacgtctggttcccttgttccccgagacatggaggcgcaacaccggccgcatggttccagcgacggtcggagtgggggatcgcgcaatcgggttcactcggacggccgatcaagaccgtgcgaacacatggtcgatgtcggcactgctgttcgagcagaccgaggacggactcatgatccgtgatcccgatggcaggctctggaccatcgcacaagcgtggagcgtgcccatctccatggtcgccgccgatgcgttcaagatcgggctgcccggctcaccagcccctcggctcaccattgacaatctcgtcgtgttccgtcgtacctggaggtttcccgctggctccatcgacatcatgcacggttcagccgccgagaaacacgctcggctgagggagtggcaggtcacgaatcaccttcctgaccacctcttcgtcaagttcccctccgaacccaagccgatctacttctccttcgagtcccccgccatggccacggtcttcacgcgatcactgcagcgcgacgcccgagagaatccagacagtctcgtgacgatgtccgaagcactgcccgagcctcaatcctcatggctgcacgacacccggagccaccactacgtccacgaattccggctgcaactgaccaaggagcgacatgacgaccacagttgagacacatcccgaaacacgtggcacaaccgcgacatccatctccaatctgatcggtcacacccctctcgtaagaatggaccatctgttcgacggcctccccttcgaggtgtacggcaagctcgagaagctcaatcctggcggaagcatcaaggatcgagcagcacaatccatgatcgaacgggcaattcgacggggtgagatcgtcccgggccgtacgaccgtcatcgagtccagttcgggaaatctcggcatcgccgtggcgatactgtgccaggagcacggcctgaatttcatctgcgtaaccgatgccaaggccacgccaacgaacattcgactcatcgaagcgttcggggccactgttgaggtgatcgaagaacctcatcccgagagtggcgaattcctccccatgaggctcaagagggtaagagaactgctgtcagagattccagatgcatggtggccgaatcagtacgggaaccccgacaatccggcggctcacgagcggactgtccgcgagatcatcgaggcaatcccgcgggttgacacgattgtctgcgcgaccggctcgtgcggaacccttcgcggctgccacgaagcattgcgaaagctgtccccacgcacccgactcgtcgccgtggacgccaagggcagcgccatcttcgacgaggcaggagcaccccatccccgctgtgtcccgggacacggtgcgtcagtgcgaccgccgctgtggcgcgcggggctcgccgaccaactggttctggtctccgacgcggactgcgtcgtgggatgccaggaggccctgcgcaccgaggctcttctcctcggcggatcctcgggagcaattctgacggccattcaccgagtgtctcccacgattcccgctggttccaccgtggtgacgatcctccccgacggcggcgagcgctacatcgacaccatctacagccgctcgtgggtcgactcacacatccccgggctgccctctctcgccgactggggggctcccaaccccgccaattcgtatgacctgaacagaagtgcctcatgaagctctacaccagagagaccgtcgaaactgcgcttgtcgggcgtcatggccaggttctcagtgccgtacagagtgcatacatgctgcattcgacgggagagacatcgctgccattctcaaccttcctccgcccggccgggtatccgaacgatcggatcatcgcacttcccgcccacatcggaggcgacttcgacatagccggtatcaagtggatctcatccttcccggaaaacctcgaccggggccagcaacgagcttcctccgtactcatcctcaatagtctggagacgggatacccgaccgccctgctggagtccagtcagatttcagcaacgcgaacggcagcatcagccgccctggccagcgccaccctccatggctccgaagaccatgtcagcacgattggcatcatcggctgcggaacaatcaatcttgcaacgatcgactacctcttccacgtgcacccccagatcaacgaggtcctctccttcgatctgaggcgggagcgggcccatgagttctcgcacctcgtcaaggcttcgcacccagaggcccgggtccgtgtcgccaaggagcccgacgagattctggccgcaagcaacaccatcgcgatcgccacgaccgactcgagtcattggttggaccttccgccgtggcacgggccggggcaccaagtcgtcctgcacacgtcgctgcgagacctgtcagtgccctcgatcctggcagcggccaacgtcgttgacgatcctgatcacgtctgccgtgaagcgacgtccttggatctggcaactcagcagaccggcaaccgggacttcatcacggggagaatcggagacctccttcttggcgcgccgctgtcctcaagtcctgactcccgtgtcattttctcacccttcgggctcggcatcctcgacctcgcagtcgcctccgtcgtcattgctgccgcctcctcttcagcagtcgagatcaatgggttcgaccccgggaaacacgccacaagcatgattgaggtgaatcgatgaccaccacacagatcaacgacaacacggccgttctgcgcgacgtattccccgccggctccgtcgcattcgtgagcggtgcctcacgcggaattggcgctgcctgcgcgacagcccttgcggccgcgggatgcaacctcgccatcacttatcgaaggaaggagaacgaggcggcacaaatcgccgaatccattgaagccatcgggcgccagtgcatcacaatgcagatggacgtaaccgatgagaaccaagtgaccagagccttccgcatcattcgccagcattacggacgcctggacgccgcggtcttgaactcgggaatcaccagtgacgggcatcttgcaacaatgagccgctccaagtggagctcggtgatcgacacgaatctgaccggaaccttcctctgcacgcgcgaggcgaccaaggccatgtactcgtccggtggctcgatcgtcatggtcgcgtccaccagtggagttgcagggcgaccgggccaggccaactacgcagccagcaagggcggaatcgttgccatgatgaagacgctggccccggaggttgcggcaaagaacgtccgggtgaatgcggtggcacccggcttcattcagaccgacatggtggcggccgttccaaaagcggcactcgcccaggcaatccaacacatccccatgggccgtcttggcctggcacaggaggttgcgtcagccgttaccttcctggcctccccgctcgccgcctacatcacagggaagaccctcactatcgatggcggaatgatcaacggctgaccccaggacccgcacacccccagtaccgagaaagaaacaacaatgaccgagatcacccacactgccaacagcatccgaacccgcgccgaggaacgttccaacaaagcttggcgcctgaaggaggagatcatctccaagctcggtctcgagaccaagccagaatatgtctcggacaaccaaccgctcttcggacgtggccttgagatggattcccttgacactctcgaagtcgtcgtcgccgtcaacaatgagttcggagtctcggtcaacgacgacgacgtacaggcgttcggctcgatcaatgccatggtcgatttcatcgaggtgaacgagaagtgagttctcttgcgctcgaggcgccacccaaggacgcccgtaagaaattcgcctacgacagcgatgccatcaagacgatgctcccacatcgttggccgatgctcatgattgatcgcgcctacgacgtcgtcccagggaaatcgggcaaaggcatcaagtcggtcagcgtcaatgagccgttcttcgccggtcactaccctgaccattccatcatgcccggcgtcatgatcgtcgagtcgatggctcaactcgtggccgtcatctacgtagccgaggccattcagaacaatcccggcatgacgtcgcacgacgcacgttcaagcgttggttatctcggcgcgatccgtcagatgaagttccgacgcctcgtcactccgggcgaccaactcaccctccacgcccagctcggcgagaaagtgggggctctgcgcgaggtttccgtgagagcactcaatggccgggatgtcgtcgcccagggggaactcgtcgtcaccgagcggtgacacccagccacacacgagaaggaagtcccatgatcgttcgcccctacaggccacgtgatgcggaagcgatcgtacatctctacaacagccattccgactcccccaatccagtgtcgggagggattgttgaggaggagttccagagggagctcgaagaacgtggttcgacagtgttcctagtggccgaggaggccggatccattgtcggcacattcgggatgttccgcacgaatggccgacacaccatggccgatgatgaagtcttcgccgacatgttctatgtcaccccgtcacatcgactctcgacagttccgggacagctaatcactgaagccatcagcgagtgcttcatccagggcatcaacgtgatccgcctcaccgtgaaccccgcgaacatctccgcgctcaaggtttacagaaaagtcggttgtgcctgtctcggggccaccgatgcaggcgaggacgggaacattgagctgtacaacttcatccctctggttcttagggcaaccatcaccaaactcgaccacgattgtattcgagccctggcggacatgacttcgttcgcctgcatcaccgagggacgtccacttgatctgtcccacgacttcatcgtggacgctggacggaagatcgtctcccacagcatccagatcgggcgttcaaccatccacgccatggtcgacacgggctcgaggaccattgtggaggccaccctcgacaaccgcgactgggatgctcctcgccagatcgtcgcccccaccccctgtcagaaccggcccgaggaacagcgaggcaaccctgtccggctggtgcacaagaagcttgaggtcaccttcaacgaaggagtcattgagatcagtacgactggccactggggcccggtcctcgcaatgtcctggccctcctccgtctcgcaccgcgctcacgggtggcgacagggccccgccaagtcgtatcgatgcgagcttctcgagaattgcctcgtcctggatgacgaaggaggagtgaaatgcaccatcagcctcaatgattgccaagtcgcgatccggatggatggtgccccaaaaacggaattgagaatgtaccagtggtgcagcctgcgccagggctatctgacggctgacaccggcatcacgagcttcaaccgggcatccagtgggctcggagtcgccgtccgggactcgtccgagattgtcgccgcgggccttcccgtcatccctgacacaccgatcacatggagtgagggtgacatcacggttcagctcgatccctgcggccgcgcctccctgatccactcgaccctggtggaccgaagaatccacttggacgagtctggctcggcaagtctcaccatgaccgtgtttggtgattcccagccccatcgtgccgacaccgtcgagctgcctcccctcgcggcaggcaccgacaggatcgtcctcaagccggctgccggaggcgtgaccacatggcgcttgggcgccaccaaggtgctcaagtcaccgtggccacacgcccgcgcgctcgggcccaatccgatctggcgagccggcctgtgggtcagtcacgagccggatcgccacgaccgtcgccaaggaatggggtggggtcccgatcatcgcagttggaccctgtcggaagacaccatgaccagtactgacgggacactctcctggcgcttcagcggctcccccgacaccggctggacggtcgacgtcacgacgagcaacacgcacggggagaccgtcgtctggctcaccccggactgcccggcgggcgagaggatccgcacgtctgatcatgccgtgacgaccatgcttgacatctcgaagccatggcagcgctggaccacccgatgcgcaattcctctcagacacgggaagtggttcctcatcgagcctgatcatgacctcactgattcccccgaaatcctcatgcgctctgttcacggggtcctgctcgtcggctgtgtcggacgagcccactccggatccgcttcctggcgctttgccatcacgtcagaactccccacctccaacccaagaagaaacgactacacctcagccgcctgaacccaaccagttggaacacccactacagaagaaatggagcaccaccatgtccatcactgagcagtacaagacccttcgcacctcggtcggcctccacacgcctaccggtcccctggtccgtatcaccggtgatgatcgtctcgagtttctcgacaccttcctgtcccgcgcctcggacttcgtggaccccgacaccactcgggagtgcctcgctctcaccgaggacggccttccgctgacgatcttcctccacatcgagcgcgaggaggagtcatggctccttccccgcaccgccatcgatgcggcgaccctcgccacgtacctcggcaacctcgagaccgatggtgacctgtcaatcgagattgctccagagggttggggagctgtcgctgtcgaggggccgctgtcgtggcagatcgccgaaaaccttctcgacttcgacgtggctggcctcgttcttcacgccgtcacggacgtcgtcgttcccggggcccccgagggatcgaaggcatggctcgcccgggtcggaaccactggagagtacggctacctgctcgtctccaacgttcccgacctcgcccgcacttatctcctcagccgcgccacggagctgggcggtcaggcagtcgacgccgatgctctcgcacgagtccaggccgaggccgggatgccctattacgcgatgggcgtgtgccacctcgatgtcgccgggggtgacctcgcctggctcgtggactggcagcgcatcggcgagttccaaggatccgagaatctgcccacacccgtccgagaccagcgccgactggccgccatcgccctgcccaccggcaaccgcccggaagctggtcagaccgtcgctgccggggatgaggagattggaatggtggtgtacgtcaccccgtccgccaatcccgatgaggaactcgcgttcgcacttctggatgctcctttctggactcccacccttccgttgaccgtcggtgcccacgacgggaccacggtcaccctgccccgcgtcgtggcagcctccagcctcaacaagctggggtgacagcgatgacgatcactgctgagaacgccaccacccgcagcgacattgcccggagcattgcggtgaccggcgtgggactggtcacggcacagggtgaccataccgacgagtgctggaccgaacttgtcgatggggtttgcggaatcaccatgaacgtcacgttcgatgactctggcaccacgattccgtgtgctggcgtggctcccattccgaactctgattcgatcgaccgctgttacctgctcggcgtccatgccatgcgtgaagctctcgagatgagtggcatcgacctggactccgtgggtcgtgatcgcatcggactcgtggtgggctcaagcctcggcgcgatgcccaccttggaggcggctcatcgccgggccattgagaccggcgtgctcgatgccggattggcggcagactcccagctccactgcgtcgccgaccacctcgccgctgagttcgacatccgtggaccccgcgtcgtgacatcgaatgcgtgtgccgctggtgccgtggcgatcggctacgccgcagaactcctctggtccgacgatgtggacctggtcgtctgtggcggtgtcgatccactggcccagatctctgccaatgggttcacgtgcctgggagctctcgacaatctcccatgcagcccgatggccggttcctccggtctgactctgggcgagggagccgggttcatggtcctcgagagaacagatgcggcggctgccagaggccaggaggtgatggccgaaatcgccggctacggcacaagttgtgatggttaccaccagactgccccggacccgggtggcaatggcgcccgcagctcaatggaggccgccctgcgctcagctcatctcaagccgtccgacgtcagctacgtcaatctccacggcaccggtactccgaccaacgacgccgtcgagccgaaggcactccggtcattgttcaagtccgatgaccttccccctgtcagttcggtgaagggcgccatcggtcacactctcggcgctgctggcgccatcgaggccgtgtgctcgatcaaggccatccacgagggggtcctgccgccaaccgtcaacaaccgcgggcaggcttcccgaactggtctcgacatcgtgccggagtgcgcacgcaaggccgctcccgacgtggtcatctccaactccttcgccttcgggggcaacaacgcatcagtggtcatcaccgcacctcgaggaggcgttcactgtaccgccccggcgcagcttcgcgaggtcggaatctcaggaatggcagctctggcgggaaaggccgccaactcggaggagcttctttcggccctgtcagaagattgtccaatctggatggccgatgagaagacctgggaaggggatgctgtccaaaccggccatgtggacatcaagcgcctgtcccgcacaatcaacccgtccaaggttcgtcggatggaccccttgggaatcatctccagcgcggtggtgactgatctgtatgcccgacacgggaagctgagccgcaaggatgccgaaagcacgggaatcatcttcgcaaccggctacggtcctgtgacggcggtgacgcagttcaatgacgggatcatccgccacggttccgagggtgccaacgccctggtgttcccgaacaccgtggtcaacgcagccgcaggccacctcgcgatgctgaatcgctaccgtggttacacggccaccttggcatgcggtggaaccagttcactcatggcgctgcttctcgctgctcgcgtcgttggccgcggcgctgcggatcgcatcatggtcgttatcgctgacgagtttcccagcattgccgtccaggccgtcgcgaagcttcctggctaccgacacagggttgatggttccggagccgtgctctcggaaggcgcggtatgcgtcctggtggaggccgtcgaagtcgccgaagcacgcggtaccgcccccatggcgctgctacgcggcttcggatcccgtggagagtccgtgggagtcggtcacaccgcatccgatggacgggcttgggccaaggccatggccgctgcactgggcccggccggcctgactgcctccgacgtgtcgaccgtcgtggcggcatcaagcggacatcctcgcgtcgaccgagccgagcaggcggccaggcggatcgtcggactgtccgcaaccgctacgaccttcccaaaggcgattgtcggagaaacacacggatcggctgccgggatcgggctgttcggtgccctgtgcggttcgaggtcagccgcgcaccagaacatccttgtcaacgccttttcccacggcggtggttatgcctcgatggtggtggagtcactgtgaccacgacgcttctgccacgggttgcccagccgggaccgggcgtcagccatgtcgacaccgaccgtcccatcgagtgcatcatcacccaccacccccacatgccgcgtgatcgcggaggccacgccacctccgtgtcaggcaggtacttgctgcgccaagccgcagaactcatgctcggcacggatcctgcgcattgccccgtcgtcgacccttcgcggcgctggtactggcccggaatcaatcttcacggttctgtctcccatgtcccgggctggagcctgacgacgctgagcaccggcggccacatcggggcagacatccaggacttccgggagcgtcccggcgcaatggcattcatcggtgacctggtcaagctgtcgcgatcggcgtcactccgagaattcgcggagtgcgaggccgtcgtcaaggtgtccgaattgactaaggagacgttcgggcacgtgcgactgcccgaatggacacccggatggcgccacgttttcgaggactactgggtctggagtctcgagatgcacgggatgggagtcatcgcactcgcatccgatctcccccgagccattcgctggtggcggtgcgacgccgatgcccgtggccgtctccaggctctccgacccataagcagtcttggaccaggaaggccgtcatgagccggtactcacgtcgaatctcaggcatcgaacgcggctatctcaacgccgcaacccggggcccgcaccccaccatccacacgatgatcgacttcgagggccgcgtccccgccgactgttggcggcacgcatccacgattgcgtcggccgccaaccctggcatgacagtggtccggaggtcgggccgatggacatccgatccagcgggctgtccggttgtgttccacgactggaccgcggaccccaacgacgttgccgacttccacgctgacatggatctcgtgacgggaccatcgtccacgctccacgttttcgagggggcggaacgcacccgaatcaccttggcagcaagccatgccgtgaccgatgggcggggcatcgaacgatttctcgtcgacctgcttgcagcgttggacgagcgtgaacccattggaagccccgacaccctgaccgatgtcgatatcaaacgatccttggagaacagcatcaagccccgacgccacctggccgctgtgcccgccgatgtcctttctccactgggggggaggaagaaccaacgtatatgggcctccaggacgtggcacagtgccccgggagccatgagcggaagaatcgctgccgctgtggccgagatgatcgaccacgccgcaatgatcatcatcccggttgacatccggcggcacgtcccagaggtccgatccacagcaaacctaagtgcccaactgccagtgatcatcaccccgaaccagcgctggcaaagcatccatgggcatctgctcacggaccttgctcgccatcgagaccttgcgatcatcagtgaggatttccgccacaacaatccgttcgcatcgaccttggaggaaagccaggccatcggcctcgatggtgtctatccctgtgccgcaatcatctccgaccacgggaagctcgacctttcaaggttccagaccttggaactcaccccggtctcgatgcgaagcctcccgatgctcgttccctactccgcaatgttcatcagcagttgcaccgtcggcgagaccaccactgtcaccatcgctcatcgcgctgatgacgatcccgattccataaacaccttcttccaccacatcgaatcccagatgtccatctgagccacgtcgtccctggagagcaaacatgaccacccaaaatgtcatcaccccgccgcgccccgtcacctcccatgccacggcgaccaggtccgaggctccaccgcgaagcgtcatcagagccatggccatctcgatggtcgcgaccctcatggtcatgctcgacacgaccgtcgtgaacgtgtccttgagcgcgaccaccgcccgcttcgggagcatgggcagcgtgcagtgggtcctcacaagttacctacttgcactgtgcgcgacgatgacggcctccgcctgggtcatcgaccgccttggtccacggctcaccttcatcgcctcaatgaccatgttcctcatcggctcggtgatgtgtgcactgagcgattcagtgtggcaactcgtcactggcaggaccatctccggtgccggagctgggatccttgttccgacagcatccgtcctgcttatccgtggcatcccacgcgaacaacttggcagggtgcaggcactgaatgggagtgtccagttgatcgctcccctgatcggcccgactgtgggcggtctcctcgttgacaggtgcgggggctggccggccatctactgggcgaacgtccccgtagctcttgttcttctgattgaggccgtccgcgtcgatccggacgaaccacacaccgctaagcgccgcctcgatgctctcggcctggtctgtggcagcaccgcgatcgtgctgacagtgcttggtgtctcactcttcggcaggacgtcgcgaaacaccaccttcctgcttacgatcggcgcgcttgcagtcctcgcatgggcgttcttcatcacccacatccgaagggctaccaaccctctgcttgacgtttccctgtatcagaaccctgtctattcatggtccagcttcaacgtagcggtgcttggtttcggtctctacgcccccatggtcgtcatgcccctctatctcgaggcgacgcgccacctcactgccgtccacactggtctggtgatgtcagtggccggcgtcggcgtcattatggccggaatcctgtgcacgaagatcatgggccggatcggtggaggcctcacgatgacagttggcataactctgagcatcatcgccactctgcccctggtccggctgacgaaccacacctcctacatactcctggcagtctgcttggccttgcgtggagcaggaatcagcctgacaatcgtcccagccatgacacgggccttcgagtccatcaagaggacggccatggcggacgcctctgcacagctcaacctgttgcagcgaatcggcgggacaattgcgacagcagtcatcatcgcagttatccaccacgaggccatgctcacccgcggactctcccccacagtgttctcgcacgccaacgtgtggatcctcaccgcgaccgccgtcacccttctgccggccttcgcgcttgcgaaggccgaaagacaacagcaggatctctgagcaccgaggagtactccctcgtagaccctcctctgatctaattgggttcgttccaagtgtgtatctcactccggggagccccgattgctgaaccacatcccgttcaccctggcgagtccctcgtggtacgacgtcccctgggcgcccggatctccgtatctcacaggagatatctcggtcctgccagcggactcgccaaggtggacgacgaccatccggggtccttggcaaatccacatgccacctcgtccgacccttccagaggtggggtggaaagtgcatgtgtctgccaagccatcggaattggaatcggttgcctcagtcgtagcactgtggtgcgtacgccacagcgtccccttcaaagtacttcgcacccgaggtctcgttcacgcgagtcaagtcaagtatgcggaccgaagtcagagcggcaaggtctgcacctgctaccccgacggcgagagccttgagcacttctgctccggtcttgccgagctgcttcagaacgtcgattcacctccggtgtccggcgagctgcgagtcggatcctcccctctgtggttgcgtcacgggagtttccgagaggcatgggcggtgtcatccacaggagtaccgttcccggtctacccgggaacaacacatcctgatcgtcgaggccccgcgcccgcagaatccgatcacgacacgccgtggatccggaggctccgtcggacgaatcgccccagcacggttcttcccatcgacgatgtcagactcctccaccgatcaaatgctggcggcgtgtatcaggcaacatggagagacggcacatcggtagtcgtcaaggaggcccggcacctgtccggacttgatgcggcgggtgtcgacgcccgagtgcggctgcgtcacgagtacgaggccctgagaagactggacccctatcgggccgctccccatcccattgatctcattgagaccgaggacggctcgttcctgatcatggaattccttgacggaatgacagtccaccaggagatgtcgaggttccatcctctgattagtaggcgacctcatcggctatcgatgaccgatttttcacgctggtgccgagaggtcgaagatcgcttgaggaatgtcacgagggtcatggccgggtgcggaatcgttcacggggatcttcatcccgcgaatctgatacatgtcggccatgaggttttggttactgactttgaatcctgctcaatcgacggggtcgccgtctcgtcagggatcgccgctccctggttccagtcggacgacacgattcccgatccggcgacgactgacgatctccacactcttctcgtggatccgacttgcggccccgcgcttgtcccccatccaaatcttcgcgcgctcatcagccaggccgcagtcgaggacatgatgggaaatccgactagtttaccacatgcctggaacctcgaggacatgacaagcgaactcgccaaggggatccgggcatcagccactcccgcacgagccgaccgcctctttccctcagacccctacctgttcgggcatccaggttcagaattcggcctgatgcatggcgccgccggaatcatggctgctcttgccgtgactgggtacggtgttgacgcgaatcacgtgacctggatgaaggaccgcttggccacccgcccgaccctgctgccggggttggccaacggaatcgagggaattgccctgggtctctccctgtgcggtcagaacgacatggctgcatccctgctccaccagtccggaattctcacgatcacaacgaacggatcgactgacctcaccctcggtactggtatggcgggccgagcgtgcgcgctgcagtccctctcacaacgactgtcatcgaaatctctcgcccacgctgcatataccctctgggaacaactcgccgtggctgtgcggaacactgatgtggccttgccgaacggcctgttctccggttgggagggaatcgggctctccctgcttgcctctcccctgccggatcgtcatgatctcgcccgccactcactccgactggccctggccacgacaacgattgttgacggtgcgctcttctcaggcgagggacagatccgatggccatatctggggcgtggtcccgcggcatgtggcccgctcgccgccaggcttgatgatgaccagacggccaaggccgtggcacagacctgtcgttgtcccctgactgagtcatccggtctccacaatggccgcgcaggtctcctactcgtcctccgccagctcgtgggagaccaagacgacgccgttcgccgccacctcatgagactgtcgtggtcgatggaccgtcgcgaggaaggcacattgctgctgggtgatcatggcctgcgtttctcatccgatctcgcgacggggtcagccggcgccctcctcgccctgagcagggacccatggcggaacatgacacgaatgctcggaatatgcgatgacacctgtcatggcccactagtgacagtttgatctagcgccgatagttcacaactgaaagactccaaacatcgaggaaaacatgctgagccaaaacgccttggcaggcgtggctcgtttcaccacgatgaacaccaggagacagaatgtccgttgaggccatgcaatccatcgagatggacgaggaaaacagcgccagccagacagtttgcgcttgttacagcttcttctcgtggtcaggatgctgcgtagtctcccaagcggtggaagcatcttgatcgtgtgagacgccgtcgactaccctgtcccccgtggtacgcacacgccccgtcctggacagtcccggaagaccgctcatcgcctccggagtcgtcctggcggtcctgctcatcatcgcggtgatgacgatggtgcttcagcgcgaccccactctcacccccggacgccgcattctcggtatcgtcctgtccacggtccaggccgtcggattcatgtggctgcagacccgcatggttcgtcacggcaagggttcgcgcaacatgcgtgcgacccttggaagggtcggtttctgggccacgtggggactcgtcgcagtgggagtcgtcaatctgtggctgaccaactcgtggaccctcttcggggcctccgtcgccacgcccctccttctcctgccaggggtgtggagtgtggtggccaccctcgtgaccctgatcgtcggtttctccgacctcgtggtcacccacacctcgccactgacctcagccacggtcgtgctggtgaccatcgcggtgtcggtgaacctctacgcattcacgaagctgtcgacggcactcgttgaactccgctcctcccaggaggagatcgcccggctgcgcgtggacgccgagcgtcaccggatatcgcgggacctccacgacatcatcggtcgcaccctggtcgccacgtcgatgcgccagcaggcggccctccacctcgtcgaccgcgacccgcaacgggccaaggaacagctcgacgccgcccatgacgcaatcaccgaggggcagcaccagttgcgttccatcatccaggccgagatgagcaccagcctccccgacgagatcagcgacgccacattcctgtgcgaccgactccacatcgacttccgcatggatgaccgcggcagaccgcacaaacccttcgactcggcggcggcggcggccctgcgcgagggaatcacgaacatgctcaagcacagcgcggcgggctactgccacgtcgccatctccccggacctcctgaccgtcaccaacgacggttgtccgcaatcacctcgcccctccaccacaccgggcaccggaatcgaccatctccggtcccagatcgaggcgctcggtgggtcggtgacgacgtcgcggccctcgcggggcaccttccggctccgctgctccttcccgacccggggggcgtccacgaccacacccgcgaccgaaggaggacgatgacgacgagaatcctcctcgccgaggacatcaaactggtggcagaggccttcgaggcactgctctcggtggaaccggagttcgaggtcgtcgcacgggtggcacgcggcgacgacctggtcacatccgccacccgcctgttccccgacgtgatcctggccgacatcgacatgcccgggatgaccggcatcgaggccacccgaatgcttcgcgacaagggataccgcggcagaatcatcctgctcaccgccctgccgggaagcgggcacctgcacgccgcgatggctgccggagccgacgggtacctgctcaagtcgatcaccgcgccctccctcatcaacgccatccgggcggtgtgcaacggccagtcggccatcgacccgaacgtcgccgcggtcgccatgcgcaagggaccctcgcccctcaacgaccgggaaaccgagattctgcgcctagtcgccgacggttcctccaccgcgcagatcgcctcgcggctgtacctcagcaagggcaccgtcaggaactacctgtcgacggcgatgtcgaagctcgacgccgactcacgcacagcggcggtcacgcgggcacgcgaggagggctggctgtagcaggcgacccgctcagcccaccgcccctcagcccgccgactcctgacgcacggcctcctcgaccgcccggctgagcagggacccggccctgaccatcgacgtctccgggtccggctcgagatcggacaacgcgatgatccggtcgaacgcggaccgtttctcctcgggcaggtcacagcgtccgcacaccgcccagacgggcaccccggcgtcccgggcgatcttgcggatggtgtcgggaagcttgccgagcagggtctgctggtccagccgcccctcccccgtgacgacgagactggaggcggagatccgcgacaccgcgcgggaccatcccaggacgaccgccgcgcccgggcggtacctggtccccaggcacatcagcgcccagccgacccggctgggcggctgcgaaccccctggccaccgcccggcaggcctttcccgaactcagcgaccccttgaaggagtcgacggcaacgatgaccggcgcattcggatcaggacgcatgggatcagcatgtcacgtcgatacggagcagtcgcgccgcctacccctagactcgggggcatggtcaaccgagtctacctgtccctgagcgttctcgccctcgtgctgtgggtggtcgcctaccgtcacatgccgggctgggccgcgggcatcaccctggtgggcatcgtcgtgctgtcgctgtggtgcgagtggtcgcgggtgcgcaccctggccaggatcggcaagtcccgccagcagggcccccgctcctcccgaggacgcaacctgtcgtgagcaatacgattcccgcagccctccaccccggccctgacgaggcc

SEQ ID NO: 425 - DNA, 26620 bp, Propionibacterium acnes
  source 1..26620: mol_type = genomic DNA
ccttgtggacaccacgtcatccacatgacttgtgtcacatgattcccggaccatcatcaagcagatgctcacccaactgtaatgatttctgttctgaatctggacatgctctgacctgcattcaatgatcaattccgtgcgatattccacaacgcacggggaggtcgcagacaatgacaacagaaagcatccccacgcggctgctcgtgtggcacgagcagaccgatccgaccaagctcctcaggatcaccgacgcgatcaggaggggggatccccttccccccatcgaggccatggcgatcggccacagattcctcgtcctcgacggtgcgcaccgggcccaagcccaccagtactgccatcgatctgagatccgagcccgcctccacaacctccccctcagcgcggaaataccaggctggagccactccataccccgcgatgcagcagcgaaactggctcacctactcctccccgtggacgctctcggtcaggcggaaatcgtcctgcacggggtgcgccgtcaggtggggaccgcttcacaacgaccgcgcgacatctttctcgcctgccaccggatcgcgcgagttgcctacgcgcatggaatcagacctctcggcccggagttctccaacgctccgacgatcgacgccgccaccatgacctggcgcccgccgaacgtgggcacgttgtgggccatcgccagcagtctcggacccctgcccgcaactgtgacccggttcgccccgatcctccggcacgacgccatcggggattccgcgatgacacccgtcacctccgccgcgtgacgacccgcgccaattccgccccaccactggatgaggggcagccgcgtggacgatgctcctgttcaggcagggactccatacgagaccaataggaaaatcatgatcaaaaacacaagccctctgaccgtgaaaaatgtctcgaaaacattccgtggctccagcggagaagccatcaaggccgtgcaagacgtgtcattcaccgttgagcgtggtgaggttgtggcattcctcggcccgaacggcgccgggaagtccaccaccatcgacatggctctcggcctcacccgccccgacagcggccagatcgaggtcttcggtactgacccgctcagcgcggcccggtcgggacgctgcaccgcgatgacacagaccggcgggttgctgcccgacctcacgattgggcagaccatggagatcatctcctcgctctatcgtggctcccacatgaatgcctgcatggagcgagcaaggatcacgcatctggccgatcggcaggtgtcgatgtgctcgggaggcgagcgccaacgacttcgcttcgcactggctctgctgcccgatcctgacttcctcatcctcgacgagcccactgcggggatggatgtggaggcgcgccgggacttctgggcagagatccacgaggacacgcgtcgtggtcggacaattctgttcgcaacgcactacctcgacgaggtggacgagttcgccgatcgggtcatcctcatcaaggagggccgcgtcatcgccgacgacacctccgacgcgatccgcaccatgtcggggggttgcaccgttacggcgaccattcccgacttctccctggcacgactgaatctgccgggcacccaactcatcaagcagggcggcgcacgcgttgatctgcaccatcccgattccgatgccctcgcagcgcgagtcatccagctcggcggcaccgacctgcgcgtggtcccccgcagcctcgacgacgccttcctcgctctcacctcaaccaccaaggagtcctgacatgaccgcccaagcgcttcccgcagtcgccactcccaaggcccgccaccgatccgccatctcgctgaagtacttgtggtgcgagatgcgtcgccccttccggcgttcgacgatgctgttcaacctcgccctccccgcagttctgtacctggccctgttccgcaccgtccacaccgccgagctgccggacgggaacttcgcgatgtggatgatgatcggcatcgctgtctacggagcggccactgcgagcaccagctacgcagcctccatctccgtcgacgaggccaacgggtggacccgcaccatccgcctgacgccgttgtcgtcggtcgggtacgtgctggtgaaggtcctctgcgccatggccatcgccctggccccgaccctgctcatcggtctcatcgggctgttgaccggagctcacggcacgctgcgggtctgggtaatcggactgggggcggcttggctcagctcagcaatcttctccgccttcggcctggctctcggactgtccctgcgtcccgaggtcgtcatgcacgtccccggcctggtcatcaccggtctggcgttcctgggcaacgtcttcgtccccctcagcgggacgatgctcaccattggccgctggagccccgcctacggcatcaccgcgctggctcgttacccgctcaccaacggcatcgacatcgggggcggccacgactccctgacggctgccctcatcggcaccttctgctggttcgccggattcgtgttctgggcctcccgtcgatttaccaagagcacgggtcgtcagtgacagattcggccgatctccggaaggagcagtgttatgaccaagcccctcattgcagtggtcaccgcgggccaaggagcgcagaagcctcgcctgctcacgccatggctcaaggtccccggcgtcacggagaagcttgctgcatggtccgctcaggccgatgtggacctcgtcgagctcggtaccagggcgaatgcagaaaccttggcagcgaccgagaatgcgcagccactactggtctgtctcggagtcctcgtctcggatctcctggccgaccagaacattgtgctcgcaggacactccgtgggcgagctgacagcagcgtgtctcgccggggtagttgatcccgggacggccgtcactcttgcacgacggcgtggactggccatggcgcgggcctgcgctctccacccgaccaccatggcggccatcattggtgacaatccggatgacgtcctccggcggctctcggaactgggactcacggctgccaacatcaacggaggcggacagattgttgcggccggctccaccgacgcgatcgcggaactggtggcgacccctcccaacgggaccgcagtcaagccgttgcgagttgctggcgcctttcacaccaagtacatgacgcctgcgcaggacgctttcgcccaagctgctcaagacgtcaccttctccgacccgcagcacccgatcatctccaacctcgacgggcaggagatccggtccggcaatgacctgcgtgaacggctgattgcccaggtgaccgcgccagttcgatgggatctctgcatccagcagatcgcggatcgtcagccggaactcgccctatcggcccctccggggaaggtgcaggcgtcgctcttgtctcggcagatcccggacctcgcgacggtctgcatcaccacaccacgggaggcagcccaggctgcacagcggatcgaccagtccgtatccgtccttcagggggcatgatgctcatccccgagtacttcctcacagcctgttcggaccatgctgagcgcctggcgatcatcacccacaatgacgttgtgacgtgggccgaactggcgactcgcgtcgacggttttcggcgctggctgcgggaccatggcgtgcaccgccaggacagggtcgttctccagacgccaagcaccgtaggcacggtagccctcatgtgggcctgcctgctcgacggcgtgacgatggtcccggtgcaccaggacctcactgcctcccaggtgcagcaagtcatcgacgactgccgtccagctctggtgtgtggcagcccggacctcgtccaactcctcaactcccccggaatgaagacaagcacacctccaacgcggccggagtcaacgagtattctgccgtccttgtcccgggtcagccccgatgaccttgcgatgctcatctatacgtccggcacgacgggtctcccgaaggggatcatgtgtccccaccggcaggtcgccaccgccgcacggatcgtccatgactgtctcgggtaccgcacggacgacgtcattctctgtcgcctgccgttgtccttcgactacgggctctatcagattctgatgtctgccatctccggtagcgcggttgtcctgcgggacggaggcgcgcaggaccgcaacctggtgcgcgacatcgcccgtcacggcgtcactgtcgttccagtcgtgccgtccatggcgtcaatgctcatcaccctgcagcgtcgtgatcagttgccgaccatcgtcagactgttcacgaataccggggcgcgtctggcacccgagaccgcgaaccagttgctcgcaagcttccccggctcccgctatgcgtcgatgtatggcatgacggagtgcaagcgcatctccatccttccggtggaggagtacgagacgcatccggacagcgtgggaagagctctgcccagcactcacgtcgagatcgttgacgctcagggagttccggttccggcgggcgagcacggggagatcacggtgtccggcccgaccgtgatgaacggctactggcaggtgccgaacagtcccagtggacgattccgacccagcggccacggcctcactctgttcaccggtgatcgcggctggatggatgaggagggacgtctctacctcctcgggcgcgacgacgagatcgtcaagcatcacggcatccgaatcagcctgcaggagatcgagatagccgccgaagccgcgccgggcgtcgacgcagtcatcgctctcaagccggcctccgactcggcccccattgaaatcgcctactgcggcagcacgagtcccgagaacctggcccgccatctcgaaaccgtcctggaccgggcgcgacgaccccaattcatccaccaactccagcagatccccctgacccgtaacgggaaaccaaaccggtcagcagccgccgaggccatccgctcaagggcgtgacggcgaaggccaacacccacagacgaaaggaaaccaccatgacccaggccgagttcaaccagttcatcgagtccacctgctccgcgacgatcgtggatcccgaccgtcctttggtcgatcagggcatcgactccctcggaatgctcaccctcatggtcgctatcgaggacagcctcggcatcgaactggatcccgagtccctcgccgacggtaggggttccacgccctccggtcttctgtcccttgtcgagcagccgaaagcgacggtgtgacgacatgacgacgatggttccttgccgccgtgtggagatgccgcaactgttcgaccacatccccggaagcatctctctctcaggagggctgcccgatctgagcgtgctcccgagcaatcagatcgccgaactgacgtcccggatcatgcgtctcggctcaagaatcctcctgcaatactccaccccttcggtctcgtcctccttggtgccggccatcctggacctggcggaacgaacatgcatgtcaccggatccgcggaatctgatcccgaccgcgggttcccaactgggcctggccatggtgatcaatgcctttgacggcgatgagatcatctgtgactgcgccacctatcccggggcgctggccgccttcgcctctgccggcgtggaaacaacgggggtggccagtgacgaggaggggctcaacccagacgcgctcgctcacgccgtcgcagagggtcgggccaatggccgccgcatcgcagccgtctacaccacgcccaccttccagaatcccaccggctccgtacagtccgagaaccgccgtgcggccctgctcaaggtgtgtgctgacaatgacctcctcctcatcgaggacgatccgtacggcatgctgtccttcgacgggcagacgtggccagctctgaagtccatggacccacagcgcgtcatctacctgggcaccttctcgaaggtgttcgcaccgggcgtccgttccggctggatcgatccgcccgccaatcttgtcgagaaactccgcgctgtgtgcgagatcatgacactctcgccatcagccctcaaccaagcgatcatcggcgagtaccaccgtcgtcacggatgggacgaactgttggagggctatcgcgcctcctaccgcgaccgagcccgtctcctcatcggggctctcgaggctgaactggcaagaacgaattgcactggcacgtggacctggcgtgaaccacggggcggcttctacctgtggttggagaacgtcgccagcaccagcggtatcgacgttgcgcgtcgcgccgccgacaacggagtggccgtggtgcccgggaaacacttcgacgcagccggacacgattcgccgagcctgcgggtgtcgttcagcaattcacgcccggctgatctggtcgaaggagctcgtcgtctcgcccgtgcactggtgggagaggacgttcagaaatgactctcgcgacacgcaccgccaccgacaccctgcagcagaccttgccctggggcacccacgaacgtctcgtcttcgggcgggcgctcctgcgcagcaccggcttcccagccgaaggcttggccctgctcgactccgacgacatcctccccctcctcgactcctttcttgccggggacatcgacagaactcacttcgagaaggaatacaccagtcgcgaggagtccggcgcaagggcgctcatcaacgtcttgaaggacgatgcagtatcgcgcgccatcgcatggcagaaccccaccgcgtggaggtccttcgaatccctgtcgtccacgagcggaatcaatgcttcgactcggcgcaaggtacgccaactcgccctctactggcaacgttactgttccaaggctgagaccattggatacttcggcccgttcgcctgggccgaagtcgacccggaggcctctgcggtcgaattcatctcctccgaccatctgatcgaccgttcccacgtcgcaatggaggcgtgggcggtcattgagatcgggaaagccctggcatcacgggccgaccttcagtggtggatgccaccaatcctgtcccccgccgtcgacctcaacatggagagaggcaccgtgacggtggctggacaccagccacgacgggtccgggaggacgaggcacgagttctcttcctgaccgacggcacccgtcccgccgcccagatcgccaagagcctcgacatggagcccgagcggttgcgcaggatcctcgtggcccatgaacgtcgtcacaccgtgatctgggacgccaacatccctgtctcagtgcacgcgtgggacatcctgcacgaacgcattgcccagatcggagacgctgggctgcgagatgaggccactgctgttctcacgaggttcgacgagcttctggaggtcatccgcaacattcccgacgcccggtccctgacggaggcgacggaatccctgtcccgtcttttcgaaaccgtgacaggaacctcttcgaacagacgtgcgggccaggcatatgcagcccgcagcctgtgctacctggactgcacccgcgccggaaccgccaaggttgggacccggcttctcgaagccctcgacgcccccctcaacctcgtcctacaatccgctgactggttcgcggcgaccttggcaaaggaatacaccaccgaaatcacggacctcgcaaatcgaaagcagcgggcctcccaccagccactgaccatggctgatgtctggccgtccacgatgtcgctgttctggggggactcaccgtccccactgcagcgagccgtgaccgaactgtcacggcggtggagcagagtcctcgaggggctgcagccagtcgacggtcgcatcgacacgacatcgtccgctctctcgggcgccgtggacgagcagttccccgtgtgcaccccgattccagaactgtcagtgcacagcccggacctccaggtcatcacctcgagcactagcaacatcgcctccggacgagtcactgcagtcatgggtgagctacatgcctgtctgagcagtctcgacatgccgttgctcgagtggtcgctgccccatggttccattcgcgatcgcatcaacaccgcgctcaacctgcgacgtctggttcccttgttccccgagacatggaggcgcaacaccggccgcatggttccagcgacggtcggagtgggggatcgcgcaatcgggttcactcggacggccgatcaagaccgtgcgaacacatggtcgatgtcggcactgctgttcgagcagaccgaggacggactcatgatccgtgatcccgatggcaggctctggaccatcgcacaagcgtggagcgtgcccatctccatggtcgccgccgatgcgttcaagatcgggctgcccggctcaccagcccctcggctcaccattgacaatctcgtcgtgttccgtcgtacctggaggtttcccgctggctccatcgacatcatgcacggttcagccgccgagaaacacgctcggctgagggagtggcaggtcacgaatcaccttcctgaccacctcttcgtcaagttcccctccgaacccaagccgatctacttctccttcgagtcccccgccatggccacggtcttcacgcgatcactgcagcgcgacgcccgagagaatccagacagtctcgtgacgatgtccgaagcactgcccgagcctcaatcctcatggctgcacgacacccggagccaccactacgtccacgaattccggctgcaactgaccaaggagcgacatgacgaccacagttgagacacatcccgaaacacgtggcacaaccgcgacatccatctccaatctgatcggtcacacccctctcgtaagaatggaccatctgttcgacggcctccccttcgaggtgtacggcaagctcgagaagctcaatcctggcggaagcatcaaggatcgagcagcacaatccatgatcgaacgggcaattcgacggggtgagatcgtcccgggccgtacgaccgtcatcgagtccagttcgggaaatctcggcatcgccgtggcgatactgtgccaggagcacggcctgaatttcatctgcgtaaccgatgccaaggccacgccaacgaacattcgactcatcgaagcgttcggggccactgttgaggtgatcgaagaacctcatcccgagagtggcgaattcctccccatgaggctcaagagggtaagagaactgctgtcagagattccagatgcatggtggccgaatcagtacgggaaccccgacaatccggcggctcacgagcggactgtccgcgagatcatcgaggcaatcccgcgggttgacacgattgtctgcgcgaccggctcgtgcggaacccttcgcggctgccacgaagcattgcgaaagctgtccccacgcacccgactcgtcgccgtggacgccaagggcagcgccatcttcgacgaggcaggagcaccccatccccgctgtgtcccgggacacggtgcgtcagtgcgaccgccgctgtggcgcgcggggctcgccgaccaactggttctggtctccgacgcggactgcgtcgtgggatgccaggaggccctgcgcaccgaggctcttctcctcggcggatcctcgggagcaattctgacggccattcaccgagtgtctcccacgattcccgctggttccaccgtggtgacgatcctccccgacggcggcgagcgctacatcgacaccatctacagccgctcgtgggtcgactcacacatccccgggctgccctctctcgccgactggggggctcccaaccccgccaattcgtatgacctgaacagaagtgcctcatgaagctctacaccagagagaccgtcgaaactgcgcttgtcgggcgtcatggccaggttctcagtgccgtacagagtgcatacatgctgcattcgacgggagagacatcgctgccattctcaaccttcctccgcccggccgggtatccgaacgatcggatcatcgcacttcccgcccacatcggaggcgacttcgacatagccggtatcaagtggatctcatccttcccggaaaacctcgaccggggccagcaacgagcttcctccgtactcatcctcaatagtctggagacgggatacccgaccgccctgctggagtccagtcagatttcagcaacgcgaacggcagcatcagccgccctggccagcgccaccctccatggctccgaagaccatgtcagcacgattggcatcatcggctgcggaacaatcaatcttgcaacgatcgactacctcttccacgtgcacccccagatcaacgaggtcctctccttcgatctgaggcgggagcgggcccatgagttctcgcacctcgtcaaggcttcgcacccagaggcccgggtccgtgtcgccaaggagcccgacgagattctggccgcaagcaacaccatcgcgatcgccacgaccgactcgagtcattggttggaccttccgccgtggcacgggccggggcaccaagtcgtcctgcacacgtcgctgcgagacctgtcagtgccctcgatcctggcagcggccaacgtcgttgacgatcctgatcacgtctgccgtgaagcgacgtccttggatctggcaactcagcagaccggcaaccgggacttcatcacggggagaatcggagacctccttcttggcgcgccgctgtcctcaagtcctgactcccgtgtcattttctcacccttcgggctcggcatcctcgacctcgcagtcgcctccgtcgtcattgctgccgcctcctcttcagcagtcgagatcaatgggttcgaccccgggaaacacgccacaagcatgattgaggtgaatcgatgaccaccacacagatcaacgacaacacggccgttctgcgcgacgtattccccgccggctccgtcgcattcgtgagcggtgcctcacgcggaattggcgctgcctgcgcgacagcccttgcggccgcgggatgcaacctcgccatcacttatcgaaggaaggagaacgaggcggcacaaatcgccgaatccattgaagccatcgggcgccagtgcatcacaatgcagatggacgtaaccgatgagaaccaagtgaccagagccttccgcatcattcgccagcattacggacgcctggacgccgcggtcttgaactcgggaatcaccagtgacgggcatcttgcaacaatgagccgctccaagtggagctcggtgatcgacacgaatctgaccggaaccttcctctgcacgcgcgaggcgaccaaggccatgtactcgtccggtggctcgatcgtcatggtcgcgtccaccagtggagttgcagggcgaccgggccaggccaactacgcagccagcaagggcggaatcgttgccatgatgaagacgctggccccggaggttgcggcaaagaacgtccgggtgaatgcggtggcacccggcttcattcagaccgacatggtggcggccgttccaaaagcggcactcgcccaggcaatccaacacatccccatgggccgtcttggcctggcacaggaggttgcgtcagccgttaccttcctggcctccccgctcgccgcctacatcacagggaagaccctcactatcgatggcggaatgatcaacggctgaccccaggacccgcacacccccagtaccgagaaagaaacaacaatgaccgagatcacccacactgccaacagcatccgaacccgcgccgaggaacgttccaacaaagcttggcgcctgaaggaggagatcatctccaagctcggtctcgagaccaagccagaatatgtctcggacaaccaaccgctcttcggacgtggccttgagatggattcccttgacactctcgaagtcgtcgtcgccgtcaacaatgagttcggagtctcggtcaacgacgacgacgtacaggcgttcggctcgatcaatgccatggtcgatttcatcgaggtgaacgagaagtgagttctcttgcgctcgaggcgccacccaaggacgcccgtaagaaattcgcctacgacagcgatgccatcaagacgatgctcccacatcgttggccgatgctcatgattgatcgcgcctacgacgtcgtcccagggaaatcgggcaaaggcatcaagtcggtcagcgtcaatgagccgttcttcgccggtcactaccctgaccattccatcatgcccggcgtcatgatcgtcgagtcgatggctcaactcgtggccgtcatctacgtagccgaggccattcagaacaatcccggcatgacgtcgcacgacgcacgttcaagcgttggttatctcggcgcgatccgtcagatgaagttccgacgcctcgtcactccgggcgaccaactcaccctccacgcccagctcggcgagaaagtgggggctctgcgcgaggtttccgtgagagcactcaatggccgggatgtcgtcgcccagggggaactcgtcgtcaccgagcggtgacacccagccacacacgagaaggaagtcccatgatcgttcgcccctacaggccacgtgatgcggaagcgatcgtacatctctacaacagccattccgactcccccaatccagtgtcgggagggattgttgaggaggagttccagagggagctcgaagaacgtggttcgacagtgttcctagtggccgaggaggccggatccattgtcggcacattcgggatgttccgcacgaatggccgacacaccatggccgatgatgaagtcttcgccgacatgttctatgtcaccccgtcacatcgactctcgacagttccgggacagctaatcactgaagccatcagcgagtgcttcatccagggcatcaacgtgatccgcctcaccgtgaaccccgcgaacatctccgcgctcaaggtttacagaaaagtcggttgtgcctgtctcggggccaccgatgcaggcgaggacgggaacattgagctgtacaacttcatccctctggttcttagggcaaccatcaccaaactcgaccacgattgtattcgagccctggcggacatgacttcgttcgcctgcatcaccgagggacgtccacttgatctgtcccacgacttcatcgtggacgctggacggaagatcgtctcccacagcatccagatcgggcgttcaaccatccacgccatggtcgacacgggctcgaggaccattgtggaggccaccctcgacaaccgcgactgggatgctcctcgccagatcgtcgcccccaccccctgtcagaaccggcccgaggaacagcgaggcaaccctgtccggctggtgcacaagaagcttgaggtcaccttcaacgaaggagtcattgagatcagtacgactggccactggggcccggtcctcgcaatgtcctggccctcctccgtctcgcaccgcgctcacgggtggcgacagggccccgccaagtcgtatcgatgcgagcttctcgagaattgcctcgtcctggatgacgaaggaggagtgaaatgcaccatcagcctcaatgattgccaagtcgcgatccggatggatggtgccccaaaaacggaattgagaatgtaccagtggtgcagcctgcgccagggctatctgacggctgacaccggcatcacgagcttcaaccgggcatccagtgggctcggagtcgccgtccgggactcgtccgagattgtcgccgcgggccttcccgtcatccctgacacaccgatcacatggagtgagggtgacatcacggttcagctcgatccctgcggccgcgcctccctgatccactcgaccctggtggaccgaagaatccacttggacgagtctggctcggcaagtctcaccatgaccgtgtttggtgattcccagccccatcgtgccgacaccgtcgagctgcctcccctcgcggcaggcaccgacaggatcgtcctcaagccggctgccggaggcgtgaccacatggcgcttgggcgccaccaaggtgctcaagtcaccgtggccacacgcccgcgcgctcgggcccaatccgatctggcgagccggcctgtgggtcagtcacgagccggatcgccacgaccgtcgccaaggaatggggtggggtcccgatcatcgcagttggaccctgtcggaagacaccatgaccagtactgacgggacactctcctggcgcttcagcggctcccccgacaccggctggacggtcgacgtcacgacgagcaacacgcacggggagaccgtcgtctggctcaccccggactgcccggcgggcgagaggatccgcacgtctgatcatgccgtgacgaccatgcttgacatctcgaagccatggcagcgctggaccacccgatgcgcaattcctctcagacacgggaagtggttcctcatcgagcctgatcatgacctcactgattcccccgaaatcctcatgcgctctgttcacggggtcctgctcgtcggctgtgtcggacgagcccactccggatccgcttcctggcgctttgccatcacgtcagaactccccacctccaacccaagaagaaacgactacacctcagccgcctgaacccaaccagttggaacacccactacagaagaaatggagcaccaccatgtccatcactgagcagtacaagacccttcgcacctcggtcggcctccacacgcctaccggtcccctggtccgtatcaccggtgatgatcgtctcgagtttctcgacaccttcctgtcccgcgcctcggacttcgtggaccccgacaccactcgggagtgcctcgctctcaccgaggacggccttccgctgacgatcttcctccacatcgagcgcgaggaggagtcatggctccttccccgcaccgccatcgatgcggcgaccctcgccacgtacctcggcaacctcgagaccgatggtgacctgtcaatcgagattgctccagagggttggggagctgtcgctgtcgaggggccgctgtcgtggcagatcgccgaaaaccttctcgacttcgacgtggctggcctcgttcttcacgccgtcacggacgtcgtcgttcccggggcccccgagggatcgaaggcatggctcgcccgggtcggaaccactggagagtacggctacctgctcgtctccaacgttcccgacctcgcccgcacttatctcctcagccgcgccacggagctgggcggtcaggcagtcgacgccgatgctctcgcacgagtccaggccgaggccgggatgccctattacgcgatgggcgtgtgccacctcgatgtcgccgggggtgacctcgcctggctcgtggactggcagcgcatcggcgagttccaaggatccgagaatctgcccacacccgtccgagaccagcgccgactggccgccatcgccctgcccaccggcaaccgcccggaagctggtcagaccgtcgctgccggggatgaggagattggaatggtggtgtacgtcaccccgtccgccaatcccgatgaggaactcgcgttcgcacttctggatgctcctttctggactcccacccttccgttgaccgtcggtgcccacgacgggaccacggtcaccctgccccgcgtcgtggcagcctccagcctcaacaagctggggtgacagcgatgacgatcactgctgagaacgccaccacccgcagcgacattgcccggagcattgcggtgaccggcgtgggactggtcacggcacagggtgaccataccgacgagtgctggaccgaacttgtcgatggggtttgcggaatcaccatgaacgtcacgttcgatgactctggcaccacgattccgtgtgctggcgtggctcccattccgaactctgattcgatcgaccgctgttacctgctcggcgtccatgccatgcgtgaagctctcgagatgagtggcatcgacctggactccgtgggtcgtgatcgcatcggactcgtggtgggctcaagcctcggcgcgatgcccaccttggaggcggctcatcgccgggccattgagaccggcgtgctcgatgccggattggcggcagactcccagctccactgcgtcgccgaccacctcgccgctgagttcgacatccgtggaccccgcgtcgtgacatcgaatgcgtgtgccgctggtgccgtggcgatcggctacgccgcagaactcctctggtccgacgatgtggacctggtcgtctgtggcggtgtcgatccactggcccagatctctgccaatgggttcacgtgcctgggagctctcgacaatctcccatgcagcccgatggccggttcctccggtctgactctgggcgagggagccgggttcatggtcctcgagagaacagatgcggcggctgccagaggccaggaggtgatggccgaaatcgccggctacggcacaagttgtgatggttaccaccagactgccccggacccgggtggcaatggcgcccgcagctcaatggaggccgccctgcgctcagctcatctcaagccgtccgacgtcagctacgtcaatctccacggcaccggtactccgaccaacgacgccgtcgagccgaaggcactccggtcattgttcaagtccgatgaccttccccctgtcagttcggtgaagggcgccatcggtcacactctcggcgctgctggcgccatcgaggccgtgtgctcgatcaaggccatccacgagggggtcctgccgccaaccgtcaacaaccgcgggcaggcttcccgaactggtctcgacatcgtgccggagtgcgcacgcaaggccgctcccgacgtggtcatctccaactccttcgccttcgggggcaacaacgcatcagtggtcatcaccgcacctcgaggaggcgttcactgtaccgccccggcgcagcttcgcgaggtcggaatctcaggaatggcagctctggcgggaaaggccgccaactcggaggagcttctttcggccctgtcagaagattgtccaatctggatggccgatgagaagacctgggaaggggatgctgtccaaaccggccatgtggacatcaagcgcctgtcccgcacaatcaacccgtccaaggttcgtcggatggaccccttgggaatcatctccagcgcggtggtgactgatctgtatgcccgacacgggaagctgagccgcaaggatgccgaaagcacgggaatcatcttcgcaaccggctacggtcctgtgacggcggtgacgcagttcaatgacgggatcatccgccacggttccgagggtgccaacgccctggtgttcccgaacaccgtggtcaacgcagccgcaggccacctcgcgatgctgaatcgctaccgtggttacacggccaccttggcatgcggtggaaccagttcactcatggcgctgcttctcgctgctcgcgtcgttggccgcggcgctgcggatcgcatcatggtcgttatcgctgacgagtttcccagcattgccgtccaggccgtcgcgaagcttcctggctaccgacacagggttgatggttccggagccgtgctctcggaaggcgcggtatgcgtcctggtggaggccgtcgaagtcgccgaagcacgcggtaccgcccccatggcgctgctacgcggcttcggatcccgtggagagtccgtgggagtcggtcacaccgcatccgatggacgggcttgggccaaggccatggccgctgcactgggcccggccggcctgactgcctccgacgtgtcgaccgtcgtggcggcatcaagcggacatcctcgcgtcgaccgagccgagcaggcggccaggcggatcgtcggactgtccgcaaccgctacgaccttcccaaaggcgattgtcggagaaacacacggatcggctgccgggatcgggctgttcggtgccctgtgcggttcgaggtcagccgcgcaccagaacatccttgtcaacgccttttcccacggcggtggttatgcctcgatggtggtggagtcactgtgaccacgacgcttctgccacgggttgcccagccgggaccgggcgtcagccatgtcgacaccgaccgtcccatcgagtgcatcatcacccaccacccccacatgccgcgtgatcgcggaggccacgccacctccgtgtcaggcaggtacttgctgcgccaagccgcagaactcatgctcggcacggatcctgcgcattgccccgtcgtcgacccttcgcggcgctggtactggcccggaatcaatcttcacggttctgtctcccatgtcccgggctggagcctgacgacgctgagcaccggcggccacatcggggcagacatccaggacttccgggagcgtcccggcgcaatggcattcatcggtgacctggtcaagctgtcgcgatcggcgtcactccgagaattcgcggagtgcgaggccgtcgtcaaggtgtccgaattgactaaggagacgttcgggcacgtgcgactgcccgaatggacacccggatggcgccacgttttcgaggactactgggtctggagtctcgagatgcacgggatgggagtcatcgcactcgcatccgatctcccccgagccattcgctggtggcggtgcgacgccgatgcccgtggccgtctccaggctctccgacccataagcagtcttggaccaggaaggccgtcatgagccggtactcacgtcgaatctcaggcatcgaacgcggctatctcaacgccgcaacccggggcccgcaccccaccatccacacgatgatcgacttcgagggccgcgtccccgccgactgttggcggcacgcatccacgattgcgtcggccgccaaccctggcatgacagtggtccggaggtcgggccgatggacatccgatccagcgggctgtccggttgtgttccacgactggaccgcggaccccaacgacgttgccgacttccacgctgacatggatctcgtgacgggaccatcgtccacgctccacgttttcgagggggcggaacgcacccgaatcaccttggcagcaagccatgccgtgaccgatgggcggggcatcgaacgatttctcgtcgacctgcttgcagcgttggacgagcgtgaacccattggaagccccgacaccctgaccgatgtcgatatcaaacgatccttggagaacagcatcaagccccgacgccacctggccgctgtgcccgccgatgtcctttctccactgggggggaggaagaaccaacgtatatgggcctccaggacgtggcacagtgccccgggagccatgagcggaagaatcgctgccgctgtggccgagatgatcgaccacgccgcaatgatcatcatcccggttgacatccggcggcacgtcccagaggtccgatccacagcaaacctaagtgcccaactgccagtgatcatcaccccgaaccagcgctggcaaagcatccatgggcatctgctcacggaccttgctcgccatcgagaccttgcgatcatcagtgaggatttccgccacaacaatccgttcgcatcgaccttggaggaaagccaggccatcggcctcgatggtgtctatccctgtgccgcaatcatctccgaccacgggaagctcgacctttcaaggttccagaccttggaactcaccccggtctcgatgcgaagcctcccgatgctcgttccctactccgcaatgttcatcagcagttgcaccgtcggcgagaccaccactgtcaccatcgctcatcgcgctgatgacgatcccgattccataaacaccttcttccaccacatcgaatcccagatgtccatctgagccacgtcgtccctggagagcaaacatgaccacccaaaatgtcatcaccccgccgcgccccgtcacctcccatgccacggcgaccaggtccgaggctccaccgcgaagcgtcatcagagccatggccatctcgatggtcgcgaccctcatggtcatgctcgacacgaccgtcgtgaacgtgtccttgagcgcgaccaccgcccgcttcgggagcatgggcagcgtgcagtgggtcctcacaagttacctacttgcactgtgcgcgacgatgacggcctccgcctgggtcatcgaccgccttggtccacggctcaccttcatcgcctcaatgaccatgttcctcatcggctcggtgatgtgtgcactgagcgattcagtgtggcaactcgtcactggcaggaccatctccggtgccggagctgggatccttgttccgacagcatccgtcctgcttatccgtggcatcccacgcgaacaacttggcagggtgcaggcactgaatgggagtgtccagttgatcgctcccctgatcggcccgactgtgggcggtctcctcgttgacaggtgcgggggctggccggccatctactgggcgaacgtccccgtagctcttgttcttctgattgaggccgtccgcgtcgatccggacgaaccacacaccgctaagcgccgcctcgatgctctcggcctggtctgtggcagcaccgcgatcgtgctgacagtgcttggtgtctcactcttcggcaggacgtcgcgaaacaccaccttcctgcttacgatcggcgcgcttgcagtcctcgcatgggcgttcttcatcacccacatccgaagggctaccaaccctctgcttgacgtttccctgtatcagaaccctgtctattcatggtccagcttcaacgtagcggtgcttggtttcggtctctacgcccccatggtcgtcatgcccctctatctcgaggcgacgcgccacctcactgccgtccacactggtctggtgatgtcagtggccggcgtcggcgtcattatggccggaatcctgtgcacgaagatcatgggccggatcggtggaggcctcacgatgacagttggcataactctgagcatcatcgccactctgcccctggtccggctgacgaaccacacctcctacatactcctggcagtctgcttggccttgcgtggagcaggaatcagcctgacaatcgtcccagccatgacacgggccttcgagtccatcaagaggacggccatggcggacgcctctgcacagctcaacctgttgcagcgaatcggcgggacaattgcgacagcagtcatcatcgcagttatccaccacgaggccatgctcacccgcggactctcccccacagtgttctcgcacgccaacgtgtggatcctcaccgcgaccgccgtcacccttctgccggccttcgcgcttgcgaaggccgaaagacaacagcaggatctctgagcaccgaggagtactccctcgtagaccctcctctgatctaattgggttcgttccaagtgtgtatctcactccggggagccccgattgctgaaccacatcccgttcaccctggcgagtccctcgtggtacgacgtcccctgggcgcccggatctccgtatctcacaggagatatctcggtcctgccagcggactcgccaaggtggacgacgaccatccggggtccttggcaaatccacatgccacctcgtccgacccttccagaggtggggtggaaagtgcatgtgtctgccaagccatcggaattggaatcggttgcctcagtcgtagcactgtggtgcgtacgccacagcgtccccttcaaagtacttcgcacccgaggtctcgttcacgcgagtcaagtcaagtatgcggaccgaagtcagagcggcaaggtctgcacctgctaccccgacggcgagagccttgagcacttctgctccggtcttgccgagctgcttcagaacgtcgattcacctccggtgtccggcgagctgcgagtcggatcctcccctctgtggttgcgtcacgggagtttccgagaggcatgggcggtgtcatccacaggagtaccgttcccggtctacccgggaacaacacatcctgatcgtcgaggccccgcgcccgcagaatccgatcacgacacgccgtggatccggaggctccgtcggacgaatcgccccagcacggttcttcccatcgacgatgtcagactcctccaccgatcaaatgctggcggcgtgtatcaggcaacatggagagacggcacatcggtagtcgtcaaggaggcccggcacctgtccggacttgatgcggcgggtgtcgacgcccgagtgcggctgcgtcacgagtacgaggccctgagaagactggacccctatcgggccgctccccatcccattgatctcattgagaccgaggacggctcgttcctgatcatggaattccttgacggaatgacagtccaccaggagatgtcgaggttccatcctctgattagtaggcgacctcatcggctatcgatgaccgatttttcacgctggtgccgagaggtcgaagatcgcttgaggaatgtcacgagggtcatggccgggtgcggaatcgttcacggggatcttcatcccgcgaatctgatacatgtcggccatgaggttttggttactgactttgaatcctgctcaatcgacggggtcgccgtctcgtcagggatcgccgctccctggttccagtcggacgacacgattcccgatccggcgacgactgacgatctccacactcttctcgtggatccgacttgcggccccgcgcttgtcccccatccaaatcttcgcgcgctcatcagccaggccgcagtcgaggacatgatgggaaatccgactggtttaccacatgcctggaacctcgaggacatgacaagcgaactcgccaaggggatccgggcatcagccactcccgcacgagccgaccgcctctttccctcagacccctacctgttcgggcatccaggttcagaattcggcctgatgcatggcgccgccggaatcatggctgctcttgccgtgactgggtacggtgttgacgcgaatcacgtgacctggatgaaggaccgcttggccacccgcccgaccctgctgccggggttggccaacggaatcgagggaattgccctgggtctctccctgtgcggtcagaacgacatggctgcatccctgctccaccagtccggaattctcacgatcacaacgaacggatcgactgacctcaccctcggtactggtatggcgggccgagcgtgcgcgctgcagtccctctcacaacgactgtcatcgaaatctctcgcccacgctgcatataccctctgggaacaactcgccgtggctatgcggaacactgatgtggccttgccgaacggcctgttctccggttgggagggaatcgggctctccctgcttgcctctcccctgccggatcgtcatgatctcgcccgccactcactccgactggccctggccacgacaacgattgttgacggtgcgctcttctcaggcgagggacagatccgatggccatatctggggcgtggtcccgcggcatgtggcccgctcgccgccaggcttgatgatgaccagacggccaaggccgtggcacagacctgtcgttgtcccctgactgagtcatccggtctccacaatggccgcgcaggtctcctactcgtcctccgccagctcgtgggagaccaagacgacgccgttcgccgccacctcatgagactgtcgtggtcgatggaccgtcgcgaggaaggcacattgctgctgggtgatcatggcctgcgtttctcatccgatctcgcgacggggtcagccggcgccctcctcgccctgagcagggacccatggcggaacatgacacgaatgctcggaatatgcgatgacacctgtcatggcccactagtgacagtttgatctagcgccgatagttcacaactgaaagactccaaacatcgaggaaaacatgctgagccaaaacgccttggcaggcgtggctcgtttcaccacgatgaacaccaggagacagaatgtccgttgaggccatgcaatccatcgagatggacgaggaaaacagcgccagccagacagtttgcgcttgttacagcttcttctcgtggtcaggatgctgcgtagtctcccaagcggtggaagcatcttgatcgtgtgagacaccgtcgactaccctgtcccccgtggtacgcacacgccccgtcctggacagtcccggaagaccgctcatcgcctccggagtcgtcctggcggtcctgctcatcatcgcggtgatgacgatggtgcttcagcgcgaccccactctcacccccggacgccgcattctcggtatcgtcctgtccacggtccaggccgtcggattcatgtggctgcagacccgcatggttcgtcacggcaagggttcgcgcaacatgcgtgcgacccttggaagggtcggtttctgggccacgtggggactcgtcgcagtgggagtcgtcaatctgtggctgaccaactcgtggaccctcttcggggcctccgtcgccacgcccctccttctcctgccaggggtgtggagtgtggtggccaccctcgtgaccctgatcgtcggtttctccgacctcgtggtcacccacacctcgccactgacctcagccacggtcgtgctggtgaccatcgcggtgtcggtgaacctctacgcattcacgaagctgtcgacggcactcgttgaactccgctcctcccaggaggagatcgcccggctgcgcgtggacgccgagcgtcaccggatatcgcgggacctccacgacatcatcggtcgcaccctggtcgccacgtcgatgcgccagcaggcggccctccacctcgtcgaccgcgacccgcaacgggccaaggaacagctcgacgccgcccatgacgcaatcaccgaggggcagcaccagttgcgttccatcatccaggccgagatgagcaccagcctccccgacgagatcagcgacgccacattcctgtgcgaccgactccacatcgacttccgcatggatgaccgcggcagaccgcacaaacccttcgactcggcggcggcggcggccctgcgcgagggaatcacgaacatgctcaagcacagcgcggcgggctactgccacgtcgccatctccccggacctcctgaccgtcaccaacgacggttgtccgcaatcacctcgcccctccaccacaccgggcaccggaatcgaccatctccggtcccagatcgaggcgctcggtgggtcggtgacgacgtcgcggccctcgcggggcaccttccggctccgctgctccttcccgacccggggggcgtccacgaccacacccgcgaccgaaggaggacgatgacgacgagaatcctcctcgccgaggacatcaaactggtggcagaggccttcgaggcactgctctcggtggaaccggagttcgaggtcgtcgcacgggtggcacgcggcgacgacctggtcacatccgccacccgcctgttccccgacgtgatcctggccgacatcgacatgcccgggatgaccggcatcgaggccacccgaatgcttcgcgacaagggataccgcggcagaatcatcctgctcaccgccctgccgggaagcgggcacctgcacgccgcgatggctgccggagccgacgggtacctgctcaagtcgatcaccgcgccctccctcatcaacgccatccgggcggtgtgcaacggccagtcggccatcgacccgaacgtcgccgcggtcgccatgcgcaagggaccctcgcccctcaacgaccgggaaaccgagattctgcgcctagtcgccgacggttcctccaccgcgcagatcgcctcgcggctgtacctcagcaagggcaccgtcaggaactacctgtcgacggcgatgtcgaagctcgacgccgactcacgcacagcggcggtcacgcgggcacgcgaggagggctggctgtagcaggcgacccgctcagcccaccgcccctcagcccgccgactcctgacgcacggcctcctcgaccgcccggctgagcagggacccggccctgaccatcgacgtctccgggtccggctcgagatcggacaacgcgatgatccggtcgaacgcggaccgtttctcctcgggcaggtcacagcgtccgcacaccgcccagacgggcaccccggcgtcccgggcgatcttgcggatggtgtcgggaagcttgccgagcagggtctgctggtccagccgcccctcccccgtgacgacgagactggaggcggagatccgcgacaccgcgcgggaccatcccaggacgaccgccgcgcccgggcggtacctggtccccaggcacatcagcgcccagccgacccggctgggcggctgcgaaccccctggccaccgcccggcaggcctttcccgaactcagcgaccccttgaaggagtcgacggcaacgatgaccggcgcattcggatcaggacgcatgggatcagcatgtcacgtcgatacggagcagtcgcgccgcctacccctagactcgggggcatggtcaaccgagtctacctgtccctgagcgttctcgccctcgtgctgtgggtggtcgcctaccgtcacatgccgggctgggccgcgggcatcaccctggtgggcatcgtcgtgctgtcgctgtggtgcgagtggtcgcgggtgcgcaccctggccaggatcggcaagtcccgccagcagggcccccgctcctcccgaggacgcaacctgtcgtgagcaatacgattcccgcagccctccaccccggccctgacgaggcc

SEQ ID NO: 426 - DNA, 26620 bp, Propionibacterium acnes
  source 1..26620: mol_type = genomic DNA
ccttgtggacaccacgtcatccacatgacttgtgtcacatgattcccggaccatcatcaagcagatgctcacccaactgtaatgatttctgttctgaatctggacatgctctgacctgcattcaatgatcaattccgtgcgatattccacaacgcacggggaggtcgcagacaatgacaacagaaagcatccccacgcggctgctcgtgtggcacgagcagaccgatccgaccaagctcctcaggatcaccgacgcgatcaggaggggggatccccttccccccatcgaggccatggcgatcggccacagattcctcgtcctcgacggtgcgcaccgggcccaagcccaccagtactgccatcgatctgagatccgagcccgcctccacaacctccccctcagcgcggaaataccaggctggagccactccataccccgcgatgcagcagcgaaactggctcacctactcctccccgtggacgctctcggtcaggcggaaatcgtcctgcacggggtgcgccgtcaggtggggaccgcttcacaacgaccgcgcgacatctttctcgcctgccaccggatcgcgcgagttgcctacgcgcatggaatcagacctctcggcccggagttctccaacgctccgacgatcgacgccgccaccatgacctggcgcccgccgaacgtgggcacgttgtgggccatcgccagcagtctcggacccctgcccgcaactgtgacccggttcgccccgatcctccggcacgacgccatcggggattccgcgatgacacccgtcacctccgccgcgtgacgacccgcgccaattccgccccaccactggatgaggggcagccgcgtggacgatgctcctgttcaggcagggactccatacgagaccaataggaaaatcatgatcaaaaacacaagccctctgaccgtgaaaaatgtctcgaaaacattccgtggctccagcggagaagccatcaaggccgtgcaagacgtgtcattcaccgttgagcgtggtgaggttgtggcattcctcggcccgaacggcgccgggaagtccaccaccatcgacatggctctcggcctcacccgccccgacagcggccagatcgaggtcttcggtactgacccgctcagcgcggcccggtcgggacgctgcaccgcgatgacacagaccggcgggttgctgcccgacctcacgattgggcagaccatggagatcatctcctcgctctatcgtggctcccacatgaatgcctgcatggagcgagcaaggatcacgcatctggccgatcggcaggtgtcgatgtgctcgggaggcgagcgccaacgacttcgcttcgcactggctctgctgcccgatcctgacttcctcatcctcgacgagcccactgcggggatggatgtggaggcgcgccgggacttctgggcagagatccacgaggacacgcgtcgtggtcggacaattctgttcgcaacgcactacctcgacgaggtggacgagttcgccgatcgggtcatcctcatcaaggagggccgcgtcatcgccgacgacacctccgacgcgatccgcaccatgtcggggggttgcaccgttacggcgaccattcccgacttctccctggcacgactgaatctgccgggcacccaactcatcaagcagggcggcgcacgcgttgatctgcaccatcccgattccgatgccctcgcagcgcgagtcatccagctcggcggcaccgacctgcgcgtggtcccccgcagcctcgacgacgccttcctcgctctcacctcaaccaccaaggagtcctgacatgaccgcccaagcgcttcccgcagtcgccactcccaaggcccgccaccgatccgccatctcgctgaagtacttgtggtgcgagatgcgtcgccccttccggcgttcgacgatgctgttcaacctcgccctccccgcagttctgtacctggccctgttccgcaccgtccacaccgccgagctgccggacgggaacttcgcgatgtggatgatgatcggcatcgctgtctacggagcggccactgcgagcaccagctacgcagcctccatctccgtcgacgaggccaacgggtggacccgcaccatccgcctgacgccgttgtcgtcggtcgggtacgtgctggtgaaggtcctctgcgccatggccatcgccctggccccgaccctgctcatcggtctcatcgggctgttgaccggagctcacggcacgctgcgggtctgggtaatcggactgggggcggcttggctcagctcagcaatcttctccgccttcggcctggctctcggactgtccctgcgtcccgaggtcgtcatgcacgtccccggcctggtcatcaccggtctggcgttcctgggcaacgtcttcgtccccctcagcgggacgatgctcaccattggccgctggagccccgcctacggcatcaccgcgctggctcgttacccgctcaccaacggcatcgacatcgggggcggccacgactccctgacggctgccctcatcggcaccttctgctggttcgccggattcgtgttctgggcctcccgtcgatttaccaagagcacgggtcgtcagtgacagattcggccgatctccggaaggagcagtgttatgaccaagcccctcattgcagtggtcaccgcgggccaaggagcgcagaagcctcgcctgctcacgccatggctcaaggtccccggcgtcacggagaagcttgctgcatggtccgctcaggccgatgtggacctcgtcgagctcggtaccagggcgaatgcagaaaccttggcagcgaccgagaatgcgcagccactactggtctgtctcggagtcctcgtctcggatctcctggccgaccagaacattgtgctcgcaggacactccgtgggcgagctgacagcagcgtgtctcgccggggtagttgatcccgggacggccgtcactcttgcacgacggcgtggactggccatggcgcgggcctgcgctctccacccgaccaccatggcggccatcattggtgacaatccggatgacgtcctccggcggctctcggaactgggactcacggctgccaacatcaacggaggcggacagattgttgcggccggctccaccgacgcgatcgcggaactggtggcgacccctcccaacgggaccgcagtcaagccgttgcgagttgctggcgcctttcacaccaagtacatgacgcctgcgcaggacgctttcgcccaagctgctcaagacgtcaccttctccgacccgcagcacccgatcatctccaacctcgacgggcaggagatccggtccggcaatgacctgcgtgaacggctgattgcccaggtgaccgcgccagttcgatgggatctctgcatccagcagatcgcggatcgtcagccggaactcgccctatcggcccctccggggaaggtgcaggcgtcgctcttgtctcggcagatcccggacctcgcgacggtctgcatcaccacaccacgggaggcagcccaggctgcacagcggatcgaccagtccgtatccgtccttcagggggcatgatgctcatccccgagtacttcctcacagcctgttcggaccatgctgagcgcctggcgatcatcacccacaatgacgttgtgacgtgggccgaactggcgactcgcgtcgacggttttcggcgctggctgcgggaccatggcgtgcaccgccaggacagggtcgttctccagacgccaagcaccgtaggcacggtagccctcatgtgggcctgcctgctcgacggcgtgacgatggtcccggtgcaccaggacctcactgcctcccaggtgcagcaagtcatcgacgactgccgtccagctctggtgtgtggcagcccggacctcgtccaactcctcaactcccccggaatgaagacaagcacacctccaacgcggccggagtcaacgagtattctgccgtccttgtcccgggtcagccccgatgaccttgcgatgctcatctatacgtccggcacgacgggtctcccgaaggggatcatgtgtccccaccggcaggtcgccaccgccgcacggatcgtccatgactgtctcgggtaccgcacggacgacgtcattctctgtcgcctgccgttgtccttcgactacgggctctatcagattctgatgtctgccatctccggtagcgcggttgtcctgcgggacggaggcgcgcaggaccgcaacctggtgcgcgacatcgcccgtcacggcgtcactgtcgttccagtcgtgccgtccatggcgtcaatgctcatcaccctgcagcgtcgtgatcagttgccgaccatcgtcagactgttcacgaataccggggcgcgtctggcacccgagaccgcgaaccagttgctcgcaagcttccccggctcccgctatgcgtcgatgtatggcatgacggagtgcaagcgcatctccatccttccggtggaggagtacgagacgcatccggacagcgtgggaagagctctgcccagcactcacgtcgagatcgttgacgctcagggagttccggttccggcgggcgagcacggggagatcacggtgtccggcccgaccgtgatgaacggctactggcaggtgccgaacagtcccagtggacgattccgacccagcggccacggcctcactctgttcaccggtgatcgcggctggatggatgaggagggacgtctctacctcctcgggcgcgacgacgagatcgtcaagcatcacggcatccgaatcagcctgcaggagatcgagatagccgccgaagccgcgccgggcgtcgacgcagtcatcgctctcaagccggcctccgactcggcccccattgaaatcgcctactgcggcagcacgagtcccgagaacctggcccgccatctcgaaaccgtcctggaccgggcgcgacgaccccaattcatccaccaactccagcagatccccctgacccgtaacgggaaaccaaaccggtcagcagccgccgaggccatccgctcaagggcgtgacggcgaaggccaacacccacagacgaaaggaaaccaccatgacccaggccgagttcaaccagttcatcgagtccacctgctccgcgacgatcgtggatcccgaccgtcctttggtcgatcagggcatcgactccctcggaatgctcaccctcatggtcgctatcgaggacagcctcggcatcgaactggatcccgagtccctcgccgacggtaggggttccacgccctccggtcttctgtcccttgtcgagcagccgaaagcgacggtgtgacgacatgacgacgatggttccttgccgccgtgtggagatgccgcaactgttcgaccacatccccggaagcatctctctctcaggagggctgcccgatctgagcgtgctcccgagcaatcagatcgccgaactgacgtcccggatcatgcgtctcggctcaagaatcctcctgcaatactccaccccttcggtctcgtcctccttggtgccggccatcctggacctggcggaacgaacatgcatgtcaccggatccgcggaatctgatcccgaccgcgggttcccaactgggcctggccatggtgatcaatgcctttgacggcgatgagatcatctgtgactgcgccacctatcccggggcgctggccgccttcgcctctgccggcgtggaaacaacgggggtggccagtgacgaggaggggctcaacccagacgcgctcgctcacgccgtcgcagagggtcgggccaatggccgccgcatcgcagccgtctacaccacgcccaccttccagaatcccaccggctccgtacagtccgagaaccgccgtgcggccctgctcaaggtgtgtgctgacaatgacctcctcctcatcgaggacgatccgtacggcatgctgtccttcgacgggcagacgtggccagctctgaagtccatggacccacagcgcgtcatctacctgggcaccttctcgaaggtgttcgcaccgggcgtccgttccggctggatcgatccgcccgccaatcttgtcgagaaactccgcgctgtgtgcgagatcatgacactctcgccatcagccctcaaccaagcgatcatcggcgagtaccaccgtcgtcacggatgggacgaactgttggagggctatcgcgcctcctaccgcgaccgagcccgtctcctcatcggggctctcgaggctgaactggcaagaacgaattgcactggcacgtggacctggcgtgaaccacggggcggcttctacctgtggttggagaacgtcgccagcaccagcggtatcgacgttgcgcgtcgcgccgccgacaacggagtggccgtggtgcccgggaaacacttcgacgcagccggacacgattcgccgagcctgcgggtgtcgttcagcaattcacgcccggctgatctggtcgaaggagctcgtcgtctcgcccgtgcactggtgggagaggacgttcagaaatgactctcgcgacacgcaccgccaccgacaccctgcagcagaccttgccctggggcacccacgaacgtctcgtcttcgggcgggcgctcctgcgcagcaccggcttcccagccgaaggcttggccctgctcgactccgacgacatcctccccctcctcgactcctttcttgccggggacatcgacagaactcacttcgagaaggaatacaccagtcgcgaggagtccggcgcaagggcgctcatcaacgtcttgaaggacgatgcagtatcgcgcgccatcgcatggcagaaccccaccgcgtggaggtccttcgaatccctgtcgtccacgagcggaatcaatgcttcgactcggcgcaaggtacgccaactcgccctctactggcaacgttactgttccaaggctgagaccattggatacttcggcccgttcgcctgggccgaagtcgacccggaggcctctgcggtcgaattcatctcctccgaccatctgatcgaccgttcccacgtcgcaatggaggcgtgggcggtcattgagatcgggaaagccctggcatcacgggccgaccttcagtggtggatgccaccaatcctgtcccccgccgtcgacctcaacatggagagaggcaccgtgacggtggctggacaccagccacgacgggtccgggaggacgaggcacgagttctcttcctgaccgacggcacccgtcccgccgcccagatcgccaagagcctcgacatggagcccgagcggttgcgcaggatcctcgtggcccatgaacgtcgtcacaccgtgatctgggacgccaacatccctgtctcagtgcacgcgtgggacatcctgcacgaacgcattgcccagatcggagacgctgggctgcgagatgaggccactgctgttctcacgaggttcgacgagcttctggaggtcatccgcaacattcccgacgcccggtccctgacggaggcgacggaatccctgtcccgtcttttcgaaaccgtgacaggaacctcttcgaacagacgtgcgggccaggcatatgcagcccgcagcctgtgctacctggactgcacccgcgccggaaccgccaaggttgggacccggcttctcgaagccctcgacgcccccctcaacctcgtcctacaatccgctgactggttcgcggcgaccttggcaaaggaatacaccaccgaaatcacggacctcgcaaatcgaaagcagcgggcctcccaccagccactgaccatggctgatgtctggccgtccacgatgtcgctgttctggggggcctccccgtccccactgcagcgagccgtgaccgaactgtcacggcggtggagcagagtcctcgaggggctgcagccagtcgacggtcgcatcgacacgacatcgtccgctctctcgggcgccgtggacgagcagttccccgtgtgcaccccgattccagaactgtcagtgcacagcccggacctccaggtcatcacctcgagcactagcaacatcgcctccggacgagtcactgcagtcatgggtgagctacatgcctgtctgagcagtctcgacatgccgttgctcgagtggtcgctgccccatggttccattcgcgatcgcatcaacaccgcgctcaacctgcgacgtctggttcccttgttccccgagacatggaggcgcaacaccggccgcatggttccagcgacggtcggagtgggggatcgcgcaatcgggttcactcggacggccgatcaagaccgtgcgaacacatggtcgatgtcggcactgctgttcgagcagaccgaggacggactcatgatccgtgatcccgatggcaggctctggaccatcgcacaagcgtggagcgtgcccatctccatggtcgccgccgatgcgttcaagatcgggctgcccggctcaccagcccctcggctcaccattgacaatctcgtcgtgttccgtcgtacctggaggtttcccgctggctccatcgacatcatgcacggttcagccgccgagaaacacgctcggctgagggagtggcaggtcacgaatcaccttcctgaccacctcttcgtcaagttcccctccgaacccaagccgatctacttctccttcgagtcccccgccatggccacggtcttcacgcgatcactgcagcgcgacgcccgagagaatccagacagtctcgtgacgatgtccgaagcactgcccgagcctcaatcctcatggctgcacgacacccggagccaccactacgtccacgaattccggctgcaactgaccaaggagcgacatgacgaccacagttgagacacatcccgaaacacgtggcacaaccgcgacatccatctccaatctgatcggtcacacccctctcgtaagaatggaccatctgttcgacggcctccccttcgaggtgtacggcaagctcgagaagctcaatcctggcggaagcatcaaggatcgagcagcacaatccatgatcgaacgggcaattcgacggggtgagatcgtcccgggccgtacgaccgtcatcgagtccagttcgggaaatctcggcatcgccgtggcgatactgtgccaggagcacggcctgaatttcatctgcgtaaccgatgccaaggccacgccaacgaacattcgactcatcgaagcgttcggggccactgttgaggtgatcgaagaacctcatcccgagagtggcgaattcctccccatgaggctcaagagggtaagagaactgctgtcagagattccagatgcatggtggccgaatcagtacgggaaccccgacaatccggcggctcacgagcggactgtccgcgagattatcgaggcaatcccgcgggttgacacgattgtctgcgcgaccggctcgtgcggaacccttcgcggctgccacgaagcattgcgaaagctgtccccacgcacccgactcgtcgccgtggacgccaagggcagcgccatcttcgacgaggcaggagcaccccatccccgctgtgtcccgggacacggtgcgtcagtgcgaccgccgctgtggcgcgcggggctcgccgaccaactggttctggtctccgacgcggactgcgtcgtgggatgccaggaggccctgcgcaccgaggctcttctcctcggcggatcctcgggagcaattctgacggccattcaccgagtgtctcccacgattcccgctggttccaccgtggtgacgatcctccccgacggcggcgagcgctacatcgacaccatctacagccgctcgtgggtcgactcacacatccccgggctgccctctctcgccgactggggggctcccaaccccgccaattcgtatgacctgaacagaagtgcctcatgaagctctacaccagagagaccgtcgaaactgcgcttgtcgggcgtcatggccaggttctcagtgccgtacagagtgcatacatgctgcattcgacgggagagacatcgctgccattctcaaccttcctccgcccggccgggtatccgaacgatcggatcatcgcacttcccgcccacatcggaggcgacttcgacatagccggtatcaagtggatctcatccttcccggaaaacctcgaccggggccagcaacgagcttcctccgtactcatcctcaatagtctggagacgggatacccgaccgccctgctggagtccagtcagatttcagcaacgcgaacggcagcatcagccgccctggccagcgccaccctccatggctccgaagaccatgtcagcacgattggcatcatcggctgcggaacaatcaatcttgcaacgatcgactacctcttccacgtgcacccccagatcaacgaggtcctctccttcgatctgaggcgggagcgggcccatgagttctcgcacctcgtcaaggcttcgcacccagaggcccgggtccgtgtcgccaaggagcccgacgagattctggccgcaagcaacaccatcgcgatcgccacgaccgactcgagtcattggttggaccttccgccgtggcacgggccggggcaccaagtcgtcctgcacacgtcgctgcgagacctgtcagtgccctcgatcctggcagcggccaacgtcgttgacgatcctgatcacgtctgccgtgaagcgacgtccttggatctggcaactcagcagaccggcaaccgggacttcatcacggggagaatcggagacctccttcttggcgcgccgctgtcctcaagtcctgactcccgtgtcattttctcacccttcgggctcggcatcctcgacctcgcagtcgcctccgtcgtcattgctgccgcctcctcttcagcagtcgagatcaatgggttcgaccccgggaaacacgccacaagcatgattgaggtgaatcgatgaccaccacacagatcaacgacaacacggccgttctgcgcgacgtattccccgccggctccgtcgcattcgtgagcggtgcctcacgcggaattggcgctgcctgcgcgacagcccttgcggccgcgggatgcaacctcgccatcacttatcgaaggaaggagaacgaggcggcacaaatcgccgaatccattgaagccatcgggcgccagtgcatcacaatgcagatggacgtaaccgatgagaaccaagtgaccagagccttccgcatcattcgccagcattacggacgcctggacgccgcggtcttgaactcgggaatcaccagtgacgggcatcttgcaacaatgagccgctccaagtggagctcggtgatcgacacgaatctgaccggaaccttcctctgcacgcgcgaggcgaccaaggccatgtactcgtccggtggctcgatcgtcatggtcgcgtccaccagtggagttgcagggcgaccgggccaggccaactacgcagccagcaagggcggaatcgttgccatgatgaagacgctggccccggaggttgcggcaaagaacgtccgggtgaatgcggtggcacccggcttcattcagaccgacatggtggcggccgttccaaaagcggcactcgcccaggcaatccaacacatccccatgggccgtcttggcctggcacaggaggttgcgtcagccgttaccttcctggcctccccgctcgccgcctacatcacagggaagaccctcactatcgatggcggaatgatcaacggctgaccccaggacccgcacacccccagtaccgagaaagaaacaacaatgaccgagatcacccacactgccaacagcatccgaacccgcgccgaggaacgttccaacaaagcttggcgcctgaaggaggagatcatctccaagctcggtctcgagaccaagccagaatatgtctcggacaaccaaccgctcttcggacgtggccttgagatggattcccttgacactctcgaagtcgtcgtcgccgtcaacaatgagttcggagtctcggtcaacgacgacgacgtacaggcgttcggctcgatcaatgccatggtcgatttcatcgaggtgaacgagaagtgagttctcttgcgctcgaggcgccacccaaggacgcccgtaagaaattcgcctacgacagcgatgccatcaagacgatgctcccacatcgttggccgatgctcatgattgatcgcgcctacgacgtcgtcccagggaaatcgggcaaaggcatcaagtcggtcagcgtcaatgagccgttcttcgccggtcactaccctgaccattccatcatgcccggcgtcatgatcgtcgagtcgatggctcaactcgtggccgtcatctacgtagccgaggccattcagaacaatcccggcatgacgtcgcacgacgcacgttcaagcgttggttatctcggcgcgatccgtcagatgaagttccgacgcctcgtcactccgggcgaccaactcaccctccacgcccagctcggcgagaaagtgggggctctgcgcgaggtttccgtgagagcactcaatggccgggatgtcgtcgcccagggggaactcgtcgtcaccgagcggtgacacccagccacacacgagaaggaagtcccatgatcgttcgcccctacaggccacgtgatgcggaagcgatcgtacatctctacaacagccattccgactcccccaatccagtgtcgggagggattgttgaggaggagttccagagggagctcgaagaacgtggttcgacagtgttcctagtggccgaggaggccggatccattgtcggcacattcgggatgttccgcacgaatggccgacacaccatggccgatgatgaagtcttcgccgacatgttctatgtcaccccgtcacatcgactctcgacagttccgggacagctaatcactgaagccatcagcgagtgcttcatccagggcatcaacgtgatccgcctcaccgtgaaccccgcgaacatctccgcgctcaaggtttacagaaaagtcggttgtgcctgtctcggggccaccgatgcaggcgaggacgggaacattgagctgtacaacttcatccctctggttcttagggcaaccatcaccaaactcgaccacgattgtattcgagccctggcggacatgacttcgttcgcctgcatcaccgagggacgtccacttgatctgtcccacgacttcatcgtggacgctggacggaagatcgtctcccacagcatccagatcgggcgttcaaccatccacgccatggtcgacacgggctcgaggaccattgtggaggccaccctcgacaaccgcgactgggatgctcctcgccagatcgtcgcccccaccccctgtcagaaccggcccgaggaacagcgaggcaaccctgtccggctggtgcacaagaagcttgaggtcaccttcaacgaaggagtcattgagatcagtacgactggccactggggcccggtcctcgcaatgtcctggccctcctccgtctcgcaccgcgctcacgggtggcgacagggccccgccaagtcgtatcgatgcgagcttctcgagaattgcctcgtcctggatgacgaaggaggagtgaaatgcaccatcagcctcaatgattgccaagtcgcgatccggatggatggtgccccaaaaacggaattgagaatgtaccagtggtgcagcctgcgccagggctatctgacggctgacaccggcatcacgagcttcaaccgggcatccagtgggctcggagtcgccgtccgggactcgtccgagattgtcgccgcgggccttcccgtcatccctgacacaccgatcacatggagtgagggtgacatcacggttcagctcgatccctgcggccgcgcctccctgatccactcgaccctggtggaccgaagaatccacttggacgagtctggctcggcaagtctcaccatgaccgtgtttggtgattcccagccccatcgtgccgacaccgtcgagctgcctcccctcgcggcaggcaccgacaggatcgtcctcaagccggctgccggaggcgtgaccacatggcgcttgggcgccaccaaggtgctcaagtcaccgtggccacacgcccgcgcgctcgggcccaatccgatctggcgagccggcctgtgggtcagtcacgagccggatcgccacgaccgtcgccaaggaatggggtggggtcccgatcatcgcagttggaccctgtcggaagacaccatgaccagtactgacgggacactctcctggcgcttcagcggctcccccgacaccggctggacggtcgacgtcacgacgagcaacacgcacggggagaccgtcgtctggctcaccccggactgcccggcgggcgagaggatccgcacgtctgatcatgccgtgacgaccatgcttgacatctcgaagccatggcagcgctggaccacccgatgcgcaattcctctcagacacgggaagtggttcctcatcgagcctgatcatgacctcactgattcccccgaaatcctcatgcgctctgttcacggggtcctgctcgtcggctgtgtcggacgagcccactccggatccgcttcctggcgctttgccatcacgtcagaactccccacctccaacccaagaagaaacgactacacctcagccgcctgaacccaaccagttggaacacccactacagaagaaatggagcaccaccatgtccatcactgagcagtacaagacccttcgcacctcggtcggcctccacacgcctaccggtcccctggtccgtatcaccggtgatgatcgtctcgagtttctcgacaccttcctgtcccgcgcctcggacttcgtggaccccgacaccactcgggagtgcctcgctctcaccgaggacggccttccgctgacgatcttcctccacatcgagcgcgaggaggagtcatggctccttccccgcaccgccatcgatgcggcgaccctcgccacgtacctcggcaacctcgagaccgatggtgacctgtcaatcgagattgctccagagggttggggagctgtcgctgtcgaggggccgctgtcgtggcagatcgccgaaaaccttctcgacttcgacgtggctggcctcgttcttcacgccgtcacggacgtcgtcgttcccggggcccccgagggatcgaaggcatggctcgcccgggtcggaaccactggagagtacggctacctgctcgtctccaacgttcccgacctcgcccgcacttatctcctcagccgcgccacggagctgggcggtcaggcagtcgacgccgatgctctcgcacgagtccaggccgaggccgggatgccctattacgcgatgggcgtgtgccacctcgatgtcgccgggggtgacctcgcctggctcgtggactggcagcgcatcggcgagttccaaggatccgagaatctgcccacacccgtccgagaccagcgccgactggccgccatcgccctgcccaccggcaaccgcccggaagctggtcagaccgtcgctgccggggatgaggagattggaatggtggtgtacgtcaccccgtccgccaatcccgatgaggaactcgcgttcgcacttctggatgctcctttctggactcccacccttccgttgaccgtcggtgcccacgacgggaccacggtcaccctgccccgcgtcgtggcagcctccagcctcaacaagctggggtgacagcgatgacgatcactgctgagaacgccaccacccgcagcgacattgcccggagcattgcggtgaccggcgtgggactggtcacggcacagggtgaccataccgacgagtgctggaccgaacttgtcgatggggtttgcggaatcaccatgaacgtcacgttcgatgactctggcaccacgattccgtgtgctggcgtggctcccattccgaactctgattcgatcgaccgctgttacctgctcggcgtccatgccatgcgtgaagctctcgagatgagtggcatcgacctggactccgtgggtcgtgatcgcatcggactcgtggtgggctcaagcctcggcgcgatgcccaccttggaggcggctcatcgccgggccattgagaccggcgtgctcgatgccggattggcggcagactcccagctccactgcgtcgccgaccacctcgccgctgagttcgacatccgtggaccccgcgtcgtgacatcgaatgcgtgtgccgctggtgccgtggcgatcggctacgccgcagaactcctctggtccgacgatgtggacctggtcgtctgtggcggtgtcgatccactggcccagatctctgccaatgggttcacgtgcctgggagctctcgacaatctcccatgcagcccgatggccggttcctccggtctgactctgggcgagggagccgggttcatggtcctcgagagaacagatgcggcggctgccagaggccaggaggtgatggccgaaatcgccggctacggcacaagttgtgatggttaccaccagactgccccggacccgggtggcaatggcgcccgcagctcaatggaggccgccctgcgctcagctcatctcaagccgtccgacgtcagctacgtcaatctccacggcaccggtactccgaccaacgacgccgtcgagccgaaggcactccggtcattgttcaagtccgatgaccttccccctgtcagttcggtgaagggcgccatcggtcacactctcggcgctgctggcgccatcgaggccgtgtgctcgatcaaggccatccacgagggggtcctgccgccaaccgtcaacaaccgcgggcaggcttcccgaactggtctcgacatcgtgccggagtgcgcacgcaaggccgctcccgacgtggtcatctccaactccttcgccttcgggggcaacaacgcatcagtggtcatcaccgcacctcgaggaggcgttcactgtaccgccccggcgcagcttcgcgaggtcggaatctcaggaatggcagctctggcgggaaaggccgccaactcggaggagcttctttcggccctgtcagaagattgtccaatctggatggccgatgagaagacctgggaaggggatgctgtccaaaccggccatgtggacatcaagcgcctgtcccgcacaatcaacccgtccaaggttcgtcggatggaccccttgggaatcatctccagcgcggtggtgactgatctgtatgcccgacacgggaagctgagccgcaaggatgccgaaagcacgggaatcatcttcgcaaccggctacggtcctgtgacggcggtgacgcagttcaatgacgggatcatccgccacggttccgagggtgccaacgccctggtgttcccgaacaccgtggtcaacgcagccgcaggccacctcgcgatgctgaatcgctaccgtggttacacggccaccttggcatgcggtggaaccagttcactcatggcgctgcttctcgctgctcgcgtcgttggccgcggcgctgcggatcgcatcatggtcgttatcgctgacgagtttcccagcattgccgtccaggccgtcgcgaagcttcctggctaccgacacagggttgatggttccggagccgtgctctcggaaggcgcggtatgcgtcctggtggaggccgtcgaagtcgccgaagcacgcggtaccgcccccatggcgctgctacgcggcttcggatcccgtggagagtccgtgggagtcggtcacaccgcatccgatggacgggcttgggccaaggccatggccgctgcactgggcccggccggcctgactgcctccgacgtgtcgaccgtcgtggcggcatcaagcggacatcctcgcgtcgaccgagccgagcaggcggccaggcggatcgtcggactgtccgcaaccgctacgaccttcccaaaggcgattgtcggagaaacacacggatcggctgccgggatcgggctgttcggtgccctgtgcggttcgaggtcagccgcgcaccagaacatccttgtcaacgccttttcccacggcggtggttatgcctcgatggtggtggagtcactgtgaccacgacgcttctgccacgggttgcccagccgggaccgggcgtcagccatgtcgacaccgaccgtcccatcgagtgcatcatcacccaccacccccacatgccgcgtgatcgcggaggccacgccacctccgtgtcaggcaggtacttgctgcgccaagccgcagaactcatgctcggcacggatcctgcgcattgccccgtcgtcgacccttcgcggcgctggtactggcccggaatcaatcttcacggttctgtctcccatgtcccgggctggagcctgacgacgctgagcaccggcggccacatcggggcagacatccaggacttccgggagcgtcccggcgcaatggcattcatcggtgacctggtcaagctgtcgcgatcggcgtcactccgagaattcgcggagtgcgaggccgtcgtcaaggtgtccgaattgactaaggagacgttcgggcacgtgcgactgcccgaatggacacccggatggcgccacgttttcgaggactactgggtctggagtctcgagatgcacgggatgggagtcatcgcactcgcatccgatctcccccgagccattcgctggtggcggtgcgacgccgatgcccgtggccgtctccaggctctccgacccataagcagtcttggaccaggaaggccgtcatgagccggtactcacgtcgaatctcaggcatcgaacgcggctatctcaacgccgcaacccggggcccgcaccccaccatccacacgatgatcgacttcgagggccgcgtccccgccgactgttggcggcacgcatccacgattgcgtcggccgccaaccctggcatgacagtggtccggaggtcgggccgatggacatccgatccagcgggctgtccggttgtgttccacgactggaccgcggaccccaacgacgttgccgacttccacgctgacatggatctcgtgacgggaccatcgtccacgctccacgttttcgagggggcggaacgcacccgaatcaccttggcagcaagccatgccgtgaccgatgggcggggcatcgaacgatttctcgtcgacctgcttgcagcgttggacgagcgtgaacccattggaagccccgacaccctgaccgatgtcgatatcaaacgatccttggagaacagcatcaagccccgacgccacctggccgctgtgcccgccgatgtcctttctccactgggggggaggaagaaccaacgtatatgggcctccaggacgtggcacagtgccccgggagccatgagcggaagaatcgctgccgctgtggccgagatgatcgaccacgccgcaatgatcatcatcccggttgacatccggcggcacgtcccagaggtccgatccacagcaaacctaagtgcccaactgccagtgatcatcaccccgaaccagcgctggcaaagcatccatgggcatctgctcacggaccttgctcgccatcgagaccttgcgatcatcagtgaggatttccgccacaacaatccgttcgcatcgaccttggaggaaagccaggccatcggcctcgatggtgtctatccctgtgccgcaatcatctccgaccacgggaagctcgacctttcaaggttccagaccttggaactcaccccggtctcgatgcgaagcctcccgatgctcgttccctactccgcaatgttcatcagcagttgcaccgtcggcgagaccaccactgtcaccatcgctcatcgcgctgatgacgatcccgattccataaacaccttcttccaccacatcgaatcccagatgtccatctgagccacgtcgtccctggagagcaaacatgaccacccaaaatgtcatcaccccgccgcgccccgtcacctcccatgccacggcgaccaggtccgaggctccaccgcgaagcgtcatcagagccatggccatctcgatggtcgcgaccctcatggtcatgctcgacacgaccgtcgtgaacgtgtccttgagcgcgaccaccgcccgcttcgggagcatgggcagcgtgcagtgggtcctcacaagttacctacttgcactgtgcgcgacgatgacggcctccgcctgggtcatcgaccgccttggtccacggctcaccttcatcgcctcaatgaccatgttcctcatcggctcggtgatgtgtgcactgagcgattcagtgtggcaactcgtcactggcaggaccatctccggtgccggagctgggatccttgttccgacagcatccgtcctgcttatccgtggcatcccacgcgaacaacttggcagggtgcaggcactgaatgggagtgtccagttgatcgctcccctgatcggcccgactgtgggcggtctcctcgttgacaggtgcgggggctggccggccatctactgggcgaacgtccccgtagctcttgttcttctgattgaggccgtccgcgtcgatccggacgaaccacacaccgctaagcgccgcctcgatgctctcggcctggtctgtggcagcaccgcgatcgtgctgacagtgcttggtgtctcactcttcggcaggacgtcgcgaaacaccaccttcctgcttacgatcggcgcgcttgcagtcctcgcatgggcgttcttcatcacccacatccgaagggctaccaaccctctgcttgacgtttccctgtatcagaaccctgtctattcatggtccagcttcaacgtagcggtgcttggtttcggtctctacgcccccatggtcgtcatgcccctctatctcgaggcgacgcgccacctcactgccgtccacactggtctggtgatgtcagtggccggcgtcggcgtcattatggccggaatcctgtgcacgaagatcatgggccggatcggtggaggcctcacgatgacagttggcataactctgagcatcatcgccactctgcccctggtccggctgacgaaccacacctcctacatactcctggcagtctgcttggccttgcgtggagcaggaatcagcctgacaatcgtcccagccatgacacgggccttcgagtccatcaagaggacggccatggcggacgcctctgcacagctcaacctgttgcagcgaatcggcgggacaattgcgacagcagtcatcatcgcagttatccaccacgaggccatgctcacccgcggactctcccccacagtgttctcgcacgccaacgtgtggatcctcaccgcgaccgccgtcacccttctgccggccttcgcgcttgcgaaggccgaaagacaacagcaggatctctgagcaccgaggagtactccctcgtagaccctcctctgatctaattgggttcgttccaagtgtgtatctcactccggggagccccgattgctgaaccacatcccgttcaccctggcgagtccctcgtggtacgacgtcccctgggcgcccggatctccgtatctcacaggagatatctcggtcctgccagcggactcgccaaggtggacgacgaccatccggggtccttggcaaatccacatgccacctcgtccgacccttccagaggtggggtggaaagtgcatgtgtctgccaagccatcggaattggaatcggttgcctcagtcgtagcactgtggtgcgtacgccacagcgtccccttcaaagtacttcgcacccgaggtctcgttcacgcgagtcaagtcaagtatgcggaccgaagtcagagcggcaaggtctgcacctgctaccccgacggcgagagccttgagcacttctgctccggtcttgccgagctgcttcagaacgtcgattcacctccggtgtccggcgagctgcgagtcggatcctcccctctgtggttgcgtcacgggagtttccgagaggcatgggcggtgtcatccacaggagtaccgttcccggtctacccgggaacaacacatcctgatcgtcgaggccccgcgcccgcagaatccgatcacgacacgccgtggatccggaggctccgtcggacgaatcgccccagcacggttcttcccatcgacgatgtcagactcctccaccgatcaaatgctggcggcgtgtatcaggcaacatggagagacggcacatcggtagtcgtcaaggaggcccggcacctgtccggacttgatgcggcgggtgtcgacgcccgagtgcggctgcgtcacgagtacgaggccctgagaagactggacccctatcgggccgctccccatcccattgatctcattgagaccgaggacggctcgttcctgatcatggaattccttgacggaatgacagtccaccaggagatgtcgaggttccatcctctgattagtaggcgacctcatcggctatcgatgaccgatttttcacgctggtgccgagaggtcgaagatcgcttgaggaatgtcacgagggtcatggccgggtgcggaatcgttcacggggatcttcatcccgcgaatctgatacatgtcggccatgaggttttggttactgactttgaatcctgctcaatcgacggggtcgccgtctcgtcaggaatcgccgctccctggttccagtcggacgacacgattcccgatccggcgacgactgacgatctccacactcttctcgtggatccgacttgcggccccgcgcttgtcccccatccaaatcttcgcgcgctcatcagccaggccgcagtcgaggacatgatgggaaatccgactggtttaccacatgcctggaacctcgaggacatgacaagcgaactcgccaaggggatccgggcatcagccactcccgcacgagccgaccgcctctttccctcagacccctacctgttcgggcatccaggttcagaattcggcctgatgcatggcgccgccggaatcatggctgctcttgccgtgactgggtacggtgttgacgcgaatcacgtgacctggatgaaggaccgcttggccacccgcccgaccctgctgccggggttggccaacggaatcgagggaattgccctgggtctctccctgtgcggtcagaacgacatggctgcatccctgctccaccagtccggaattctcacgatcacaacgaacggatcgactgacctcaccctcggtactggtatggcgggccgagcgtgcgcgctgcagtccctctcacaacgactgtcatcgaaatctctcgcccacgctgcatataccctctgggaacaactcgccgtggctgtgcggaacactgatgtggccttgccgaacggcctgttctccggttgggagggaatcgggctctccctgcttgcctctcccctgccggatcgtcatgatctcgcccgccactcactccgactggccctggccacgacaacgattgttgacggtgcgctcttctcaggcgagggacagatccgatggccatatctggggcgtggtcccgcggcatgtggcccgctcgccgccaggcttgatgatgaccagacggccaaggccgtggcacagacctgtcgttgtcccctgactgagtcatccggtctccacaatggccgcgcaggtctcctactcgtcctccgccagctcgtgggagaccaagacgacgccgttcgccgccacctcatgagactgtcgtggtcgatggaccgtcgcgaggaaggcacattgctgctgggtgatcatggcctgcgtttctcatccgatctcgcgacggggtcagccggcgccctcctcgccctgagcagggacccatggcggaacatgacacgaatgctcggaatatgcgatgacacctgtcatggcccactagtgacagtttgatctagcgccgatagttcacaactgaaagactccaaacatcgaggaaaacatgctgagccaaaacgccttggcaggcgtggctcgtttcaccacgatgaacaccaggagacagaatgtccgttgaggccatgcaatccatcgagatggacgaggaaaacagcgccagccagacagtttgcgcttgttacagcttcttctcgtggtcaggatgctgcgtagtctcccaagcggtggaagcatcttgatcgtgtgagacgccgtcgactaccctgtcccccgtggtacgcacacgccccgtcctggacagtcccggaagaccgctcatcgcctccggagtcgtcctggcggtcctgctcatcatcgcggtgatgacgatggtgcttcagcgcgaccccactctcacccccggacgccgcattctcggtatcgtcctgtccacggtccaggccgtcggattcatgtggctgcagacccgcatggttcgtcacggcaagggttcgcgcaacatgcgtgcgacccttggaagggtcggtttctgggccacgtggggactcgtcgcagtgggagtcgtcaatctgtggctgaccaactcgtggaccctcttcggggcctccgtcgccacgcccctccttctcctgccaggggtgtggagtgtggtggccaccctcgtgaccctgatcgtcggtttctccgacctcgtggtcacccacacctcgccactgacctcagccacggtcgtgctggtgaccatcgcggtgtcggtgaacctctacgcattcacgaagctgtcgacggcactcgttgaactccgctcctcccaggaggagatcgcccggctgcgcgtggacgccgagcgtcaccggatatcgcgggacctccacgacatcatcggtcgcaccctggtcgccacgtcgatgcgccagcaggcggccctccacctcgtcgaccgcgacccgcaacgggccaaggaacagctcgacgccgcccatgacgcaatcaccgaggggcagcaccagttgcgttccatcatccaggccgagatgagcaccagcctccccgacgagatcagcgacgccacattcctgtgcgaccgactccacatcgacttccgcatggatgaccgcggcagaccgcacaaacccttcgactcggcggcggcggcggccctgcgcgagggaatcacgaacatgctcaagcacagcgcggcgggctactgccacgtcgccatctccccggacctcctgaccgtcaccaacgacggttgtccgcaatcacctcgcccctccaccacaccgggcaccggaatcgaccatctccggtcccagatcgaggcgctcggtgggtcggtgacgacgtcgcggccctcgcggggcaccttccggctccgctgctccttcccgacccggggggcgtccacgaccacacccgcgaccgaaggaggacgatgacgacgagaatcctcctcgccgaggacatcaaactggtggcagaggccttcgaggcactgctctcggtggaaccggagttcgaggtcgtcgcacgggtggcacgcggcgacgacctggtcacatccgccacccgcctgttccccgacgtgatcctggccgacatcgacatgcccgggatgaccggcatcgaggccacccgaatgcttcgcgacaagggataccgcggcagaatcatcctgctcaccgccctgccgggaagcgggcacctgcacgccgcgatggctgccggagccgacgggtacctgctcaagtcgatcaccgcgccctccctcatcaacgccatccgggcggtgtgcaacggccagtcggccatcgacccgaacgtcgccgcggtcgccatgcgcaagggaccctcgcccctcaacgaccgggaaaccgagattctgcgcctagtcgccgacggttcctccaccgcgcagatcgcctcgcggctgtacctcagcaagggcaccgtcaggaactacctgtcgacggcgatgtcgaagctcgacgccgactcacgcacagcggcggtcacgcgggcacgcgaggagggctggctgtagcaggcgacccgctcagcccaccgcccctcagcccgccgactcctgacgcacggcctcctcgaccgcccggctgagcagggacccggccctgaccatcgacgtctccgggtccggctcgagatcggacaacgcgatgatccggtcgaacgcggaccgtttctcctcgggcaggtcacagcgtccgcacaccgcccagacgggcaccccggcgtcccgggcgatcttgcggatggtgtcgggaagcttgccgagcagggtctgctggtccagccgcccctcccccgtgacgacgagactggaggcggagatccgcgacaccgcgcgggaccatcccaggacgaccgccgcgcccgggcggtacctggtccccaggcacatcagcgcccagccgacccggctgggcggctgcgaaccccctggccaccgcccggcaggcctttcccgaactcagcgaccccttgaaggagtcgacggcaacgatgaccggcgcattcggatcaggacgcatgggatcagcatgtcacgtcgatacggagcagtcgcgccgcctacccctagactcgggggcatggtcaaccgagtctacctgtccctgagcgttctcgccctcgtgctgtgggtggtcgcctaccgtcacatgccgggctgggccgcgggcatcaccctggtgggcatcgtcgtgctgtcgctgtggtgcgagtggtcgcgggtgcgcaccctggccaggatcggcaagtcccgccagcagggcccccgctcctcccgaggacgcaacctgtcgtgagcaatacgattcccgcagccctccaccccggccctgacgaggcc

SEQ ID NO: 427 - DNA, 26620 bp, Propionibacterium acnes
  source 1..26620: mol_type = genomic DNA
ccttgtggacaccacgtcatccacatgacttgtgtcacatgattcccggaccatcatcaagcagatgctcacccaactgtaatgatttctgttctgaatctggacatgctctgacctgcattcaatgatcaattccgtgcgatattccacaacgcacggggaggtcgcagacaatgacaacagaaagcatccccacgcggctgctcgtgtggcacgagcagaccgatccgaccaagctcctcaggatcaccgacgcgatcaggaggggggatccccttccccccatcgaggccatggcgatcggccacagattcctcgtcctcgacggtgcgcaccgggcccaagcccaccagtactgccatcgatctgagatccgagcccgcctccacaacctccccctcagcgcggaaataccaggctggagccactccataccccgcgatgcagcagcgaaactggctcacctactcctccccgtggacgctctcggtcaggcggaaatcgtcctgcacggggtgcgccgtcaggtggggaccgcttcacaacgaccgcgcgacatctttctcgcctgccaccggatcgcgcgagttgcctacgcgcatggaatcagacctctcggcccggagttctccaacgctccgacgatcgacgccgccaccatgacctggcgcccgccgaacgtgggcacgttgtgggccatcgccagcagtctcggacccctgcccgcaactgtgacccggttcgccccgatcctccggcacgacgccatcggggattccgcgatgacacccgtcacctccgccgcgtgacgacccgcgccaattccgccccaccactggatgaggggcagccgcgtggacgatgctcctgttcaggcagggactccatacgagaccaataggaaaatcatgatcaaaaacacaagccctctgaccgtgaaaaatgtctcgaaaacattccgtggctccagcggagaagccatcaaggccgtgcaagacgtgtcattcaccgttgagcgtggtgaggttgtggcattcctcggcccgaacggcgccgggaagtccaccaccatcgacatggctctcggcctcacccgccccgacagcggccagatcgaggtcttcggtactgacccgctcagcgcggcccggtcgggacgctgcaccgcgatgacacagaccggcgggttgctgcccgacctcacgattgggcagaccatggagatcatctcctcgctctatcgtggctcccacatgaatgcctgcatggagcgagcaaggatcacgcatctggccgatcggcaggtgtcgatgtgctcgggaggcgagcgccaacgacttcgcttcgcactggctctgctgcccgatcctgacttcctcatcctcgacgagcccactgcggggatggatgtggaggcgcgccgggacttctgggcagagatccacgaggacacgcgtcgtggtcggacaattctgttcgcaacgcactacctcgacgaggtggacgagttcgccgatcgggtcatcctcatcaaggagggccgcgtcatcgccgacgacacctccgacgcgatccgcaccatgtcggggggttgcaccgttacggcgaccattcccgacttctccctggcacgactgaatctgccgggcacccaactcatcaagcagggcggcgcacgcgttgatctgcaccatcccgattccgatgccctcgcagcgcgagtcatccagctcggcggcaccgacctgcgcgtggtcccccgcagcctcgacgacgccttcctcgctctcacctcaaccaccaaggagtcctgacatgaccgcccaagcgcttcccgcagtcgccactcccaaggcccgccaccgatccgccatctcgctgaagtacttgtggtgcgagatgcgtcgccccttccggcgttcgacgatgctgttcaacctcgccctccccgcagttctgtacctggccctgttccgcaccgtccacaccgccgagctgccggacgggaacttcgcgatgtggatgatgatcggcatcgctgtctacggagcggccactgcgagcaccagctacgcagcctccatctccgtcgacgaggccaacgggtggacccgcaccatccgcctgacgccgttgtcgtcggtcgggtacgtgctggtgaaggtcctctgcgccatggccatcgccctggccccgaccctgctcatcggtctcatcgggctgttgaccggagctcacggcacgctgcgggtctgggtaatcggactgggggcggcttggctcagctcagcaatcttctccgccttcggcctggctctcggactgtccctgcgtcccgaggtcgtcatgcacgtccccggcctggtcatcaccggtctggcgttcctgggcaacgtcttcgtccccctcagcgggacgatgctcaccattggccgctggagccccgcctacggcatcaccgcgctggctcgttacccgctcaccaacggcatcgacatcgggggcggccacgactccctgacggctgccctcatcggcaccttctgctggttcgccggattcgtgttctgggcctcccgtcgatttaccaagagcacgggtcgtcagtgacagattcggccgatctccggaaggagcagtgttatgaccaagcccctcattgcagtggtcaccgcgggccaaggagcgcagaagcctcgcctgctcacgccatggctcaaggtccccggcgtcacggagaagcttgctgcatggtccgctcaggccgatgtggacctcgtcgagctcggtaccagggcgaatgcagaaaccttggcagcgaccgagaatgcgcagccactactggtctgtctcggagtcctcgtctcggatctcctggccgaccagaacattgtgctcgcaggacactccgtgggcgagctgacagcagcgtgtctcgccggggtagttgatcccgggacggccgtcactcttgcacgacggcgtggactggccatggcgcgggcctgcgctctccacccgaccaccatggcggccatcattggtgacaatccggatgacgtcctccggcggctctcggaactgggactcacggctgccaacatcaacggaggcggacagattgttgcggccggctccaccgacgcgatcgcggaactggtggcgacccctcccaacgggaccgcagtcaagccgttgcgagttgctggcgcctttcacaccaagtacatgacgcctgcgcaggacgctttcgcccaagctgctcaagacgtcaccttctccgacccgcagcacccgatcatctccaacctcgacgggcaggagatccggtccggcaatgacctgcgtgaacggctgattgcccaggtgaccgcgccagttcgatgggatctctgcatccagcagatcgcggatcgtcagccggaactcgccctatcggcccctccggggaaggtgcaggcgtcgctcttgtctcggcagatcccggacctcgcgacggtctgcatcaccacaccacgggaggcagcccaggctgcacagcggatcgaccagtccgtatccgtccttcagggggcatgatgctcatccccgagtacttcctcacagcctgttcggaccatgctgagcgcctggcgatcatcacccacaatgacgttgtgacgtgggccgaactggcgactcgcgtcgacggttttcggcgctggctgcgggaccatggcgtgcaccgccaggacagggtcgttctccagacgccaagcaccgtaggcacggtagccctcatgtgggcctgcctgctcgacggcgtgacgatggtcccggtgcaccaggacctcactgcctcccaggtgcagcaagtcatcgacgactgccgtccagctctggtgtgtggcagcccggacctcgtccaactcctcaactcccccggaatgaagacaagcacacctccaacgcggccggagtcaacgagtattctgccgtccttgtcccgggtcagccccgatgaccttgcgatgctcatctatacgtccggcacgacgggtctcccgaaggggatcatgtgtccccaccggcaggtcgccaccgccgcacggatcgtccatgactgtctcgggtaccgcacggacgacgtcattctctgtcgcctgccgttgtccttcgactacgggctctatcagattctgatgtctgccatctccggtagcgcggttgtcctgcgggacggaggcgcgcaggaccgcaacctggtgcgcgacatcgcccgtcacggcgtcactgtcgttccagtcgtgccgtccatggcgtcaatgctcatcaccctgcagcgtcgtgatcagttgccgaccatcgtcagactgttcacgaataccggggcgcgtctggcacccgagaccgcgaaccagttgctcgcaagcttccccggctcccgctatgcgtcgatgtatggcatgacggagtgcaagcgcatctccatccttccggtggaggagtacgagacgcatccggacagcgtgggaagagctctgcccagcactcacgtcgagatcgttgacgctcagggagttccggttccggcgggcgagcacggggagatcacggtgtccggcccgaccgtgatgaacggctactggcaggtgccgaacagtcccagtggacgattccgacccagcggccacggcctcactctgttcaccggtgatcgcggctggatggatgaggagggacgtctctacctcctcgggcgcgacgacgagatcgtcaagcatcacggcatccgaatcagcctgcaggagatcgagatagccgccgaagccgcgccgggcgtcgacgcagtcatcgctctcaagccggcctccgactcggcccccattgaaatcgcctactgcggcagcacgagtcccgagaacctggcccgccatctcgaaaccgtcctggaccgggcgcgacgaccccaattcatccaccaactccagcagatccccctgacccgtaacgggaaaccaaaccggtcagcagccgccgaggccatccgctcaagggcgtgacggcgaaggccaacacccacagacgaaaggaaaccaccatgacccaggccgagttcaaccagttcatcgagtccacctgctccgcgacgatcgtggatcccgaccgtcctttggtcgatcagggcatcgactccctcggaatgctcaccctcatggtcgctatcgaggacagcctcggcatcgaactggatcccgagtccctcgccgacggtaggggttccacgccctccggtcttctgtcccttgtcgagcagccgaaagcgacggtgtgacgacatgacgacgatggttccttgccgccgtgtggagatgccgcaactgttcgaccacatccccggaagcatctctctctcaggagggctgcccgatctgagcgtgctcccgagcaatcagatcgccgaactgacgtcccggatcatgcgtctcggctcaagaatcctcctgcaatactccaccccttcggtctcgtcctccttggtgccggccatcctggacctggcggaacgaacatgcatgtcaccggatccgcggaatctgatcccgaccgcgggttcccaactgggcctggccatggtgatcaatgcctttgacggcgatgagatcatctgtgactgcgccacctatcccggggcgctggccgccttcgcctctgccggcgtggaaacaacgggggtggccagtgacgaggaggggctcaacccagacgcgctcgctcacgccgtcgcagagggtcgggccaatggccgccgcatcgcagccgtctacaccacgcccaccttccagaatcccaccggctccgtacagtccgagaaccgccgtgcggccctgctcaaggtgtgtgctgacaatgacctcctcctcatcgaggacgatccgtacggcatgctgtccttcgacgggcagacgtggccagctctgaagtccatggacccacagcgcgtcatctacctgggcaccttctcgaaggtgttcgcaccgggcgtccgttccggctggatcgatccgcccgccaatcttgtcgagaaactccgcgctgtgtgcgagatcatgacactctcgccatcagccctcaaccaagcgatcatcggcgagtaccaccgtcgtcacggatgggacgaactgttggagggctatcgcgcctcctaccgcgaccgagcccgtctcctcatcggggctctcgaggctgaactggcaagaacgaattgcactggcacgtggacctggcgtgaaccacggggcggcttctacctgtggttggagaacgtcgccagcaccagcggtatcgacgttgcgcgtcgcgccgccgacaacggagtggccgtggtgcccgggaaacacttcgacgcagccggacacgattcgccgagcctgcgggtgtcgttcagcaattcacgcccggctgatctggtcgaaggagctcgtcgtctcgcccgtgcactggtgggagaggacgttcagaaatgactctcgcgacacgcaccgccaccgacaccctgcagcagaccttgccctggggcacccacgaacgtctcgtcttcgggcgggcgctcctgcgcagcaccggcttcccagccgaaggcttggccctgctcgactccgacgacatcctccccctcctcgactcctttcttgccggggacatcgacagaactcacttcgagaaggaatacaccagtcgcgaggagtccggcgcaagggcgctcatcaacgtcttgaaggacgatgcagtatcgcgcgccatcgcatggcagaaccccaccgcgtggaggtccttcgaatccctgtcgtccacgagcggaatcaatgcttcgactcggcgcaaggtacgccaactcgccctctactggcaacgttactgttccaaggctgagaccattggatacttcggcccgttcgcctgggccgaagtcgacccggaggcctctgcggtcgaattcatctcctccgaccatctgatcgaccgttcccacgtcgcaatggaggcgtgggcggtcattgagatcgggaaagccctggcatcacgggccgaccttcagtggtggatgccaccaatcctgtcccccgccgtcgacctcaacagggagagaggcaccgtgacggtggctggacaccagccacgacgggtccgggaggacgaggcacgagttctcttcctgaccgacggcacccgtcccgccgcccagatcgccaagagcctcgacatggagcccgagcggttgcgcaggatcctcgtggcccatgaacgtcgtcacaccgtgatctgggacgccaacatccctgtctcagtgcacgcgtgggacatcctgcacgaacgcattgcccagatcggagacgctgggctgcgagatgaggccactgctgttctcacgaggttcgacgagcttctggaggtcatccgcaacattcccgacgcccggtccctgacggaggcgacggaatccctgtcccgtcttttcgaaaccgtgacaggaacctcttcgaacagacgtgcgggccaggcatatgcagcccgcagcctgtgctacctggactgcacccgcgccggaaccgccaaggttgggacccggcttctcgaagccctcgacgcccccctcaacctcgtcctacaatccgctgactggttcgcggcgaccttggcaaaggaatacaccaccgaaatcacggacctcgcaaatcgaaagcagcgggcctcccaccagccactgaccatggctgatgtctggccgtccacgatgtcgctgttctggggggactcaccgtccccactgcagcgagccgtgaccgaactgtcacggcggtggagcagagtcctcgaggggctgcagccagtcgacggtcgcatcgacacgacatcgtccgctctctcgggcgccgtggacgagcagttccccgtgtgcaccccgattccagaactgtcagtgcacagcccggacctccaggtcatcacctcgagcactagcaacatcgcctccggacgagtcactgcagtcatgggtgagctacatgcctgtctgagcagtctcgacatgccgttgctcgagtggtcgctgccccatggttccattcgcgatcgcatcaacaccgcgctcaacctgcgacgtctggttcccttgttccccgagacatggaggcgcaacaccggccgcatggttccagcgacggtcggagtgggggatcgcgcaatcgggttcactcggacggccgatcaagaccgtgcgaacacatggtcgatgtcggcactgctgttcgagcagaccgaggacggactcatgatccgtgatcccgatggcaggctctggaccatcgcacaagcgtggagcgtgcccatctccatggtcgccgccgatgcgttcaagatcgggctgcccggctcaccagcccctcggctcaccattgacaatctcgtcgtgttccgtcgtacctggaggtttcccgctggctccatcgacatcatgcacggttcagccgccgagaaacacgctcggctgagggagtggcaggtcacgaatcaccttcctgaccacctcttcgtcaagttcccctccgaacccaagccgatctacttctccttcgagtcccccgccatggccacggtcttcacgcgatcactgcagcgcgacgcccgagagaatccagacagtctcgtgacgatgtccgaagcactgcccgagcctcaatcctcatggctgcacgacacccggagccaccactacgtccacgaattccggctgcaactgaccaaggagcgacatgacgaccacagttgagacacatcccgaaacacgtggcacaaccgcgacatccatctccaatctgatcggtcacacccctctcgtaagaatggaccatctgttcgacggcctccccttcgaggtgtacggcaagctcgagaagctcaatcctggcggaagcatcaaggatcgagcagcacaatccatgatcgaacgggcaattcgacggggtgagatcgtcccgggccgtacgaccgtcatcgagtccagttcgggaaatctcggcatcgccgtggcgatactgtgccaggagcacggcctgaatttcatctgcgtaaccgatgccaaggccacgccaacgaacattcgactcatcgaagcgttcggggccactgttgaggtgatcgaagaacctcatcccgagagtggcgaattcctccccatgaggctcaagagggtaagagaactgctgtcagagattccagatgcatggtggccgaatcagtacgggaaccccgacaatccggcggctcacgagcggactgtccgcgagatcatcgaggcaatcccgcgggttgacacgattgtctgcgcgaccggctcgtgcggaacccttcgcggctgccacgaagcattgcgaaagctgtccccacgcacccgactcgtcgccgtggacgccaagggcagcgccatcttcgacgaggcaggagcaccccatccccgctgtgtcccgggacacggtgcgtcagtgcgaccgccgctgtggcgcgcggggctcgccgaccaactggttctggtctccgacgcggactgcgtcgtgggatgccaggaggccctgcgcaccgaggctcttctcctcggcggatcctcgggagcaattctgacggccattcaccgagtgtctcccacgattcccgctggttccaccgtggtgacgatcctccccgacggcggcgagcgctacatcgacaccatctacagccgctcgtgggtcgactcacacatccccgggctgccctctctcgccgactggggggctcccaaccccgccaattcgtatgacctgaacagaagtgcctcatgaagctctacaccagagagaccgtcgaaactgcgcttgtcgggcgtcatggccaggttctcagtgccgtacagagtgcatacatgctgcattcgacgggagagacatcgctgccattctcaaccttcctccgcccggccgggtatccgaacgatcggatcatcgcacttcccgcccacatcggaggcgacttcgacatagccggtatcaagtggatctcatccttcccggaaaacctcgaccggggccagcaacgagcttcctccgtactcatcctcaatagtctggagacgggatacccgaccgccctgctggagtccagtcagatttcagcaacgcgaacggcagcatcagccgccctggccagcgccaccctccatggctccgaagaccatgtcagcacgattggcatcatcggctgcggaacaatcaatcttgcaacgatcgactacctcttccacgtgcacccccagatcaacgaggtcctctccttcgatctgaggcgggagcgggcccatgagttctcgcacctcgtcaaggcttcgcacccagaggcccgggtccgtgtcgccaaggagcccgacgagattctggccgcaagcaacaccatcgcgatcgccacgaccgactcgagtcattggttggaccttccgccgtggcacgggccggggcaccaagtcgtcctgcacacgtcgctgcgagacctgtcagtgccctcgatcctggcagcggccaacgtcgttgacgatcctgatcacgtctgccgtgaagcgacgtccttggatctggcaactcagcagaccggcaaccgggacttcatcacggggagaatcggagacctccttcttggcgcgccgctgtcctcaagtcctgactcccgtgtcattttctcacccttcgggctcggcatcctcgacctcgcagtcgcctccgtcgtcattgctgccgcctcctcttcagcagtcgagatcaatgggttcgaccccgggaaacacgccacaagcatgattgaggtgaatcgatgaccaccacacagatcaacgacaacacggccgttctgcgcgacgtattccccgccggctccgtcgcattcgtgagcggtgcctcacgcggaattggcgctgcctgcgcgacagcccttgcggccgcgggatgcaacctcgccatcacttatcgaaggaaggagaacgaggcggcacaaatcgccgaatccattgaagccatcgggcgccagtgcatcacaatgcagatggacgtaaccgatgagaaccaagtgaccagagccttccgcatcattcgccagcattacggacgcctggacgccgcggtcttgaactcgggaatcaccagtgacgggcatcttgcaacaatgagccgctccaagtggagctcggtgatcgacacgaatctgaccggaaccttcctctgcacgcgcgaggcgaccaaggccatgtactcgtccggtggctcgatcgtcatggtcgcgtccaccagtggagttgcagggcgaccgggccaggccaactacgcagccagcaagggcggaatcgttgccatgatgaagacgctggccccggaggttgcggcaaagaacgtccgggtgaatgcggtggcacccggcttcattcagaccgacatggtggcggccgttccaaaagcggcactcgcccaggcaatccaacacatccccatgggccgtcttggcctggcacaggaggttgcgtcagccgttaccttcctggcctccccgctcgccgcctacatcacagggaagacccttactatcgatggcggaatgatcaacggctgaccccaggacccgcacacccccagtaccgagaaagaaacaacaatgaccgagatcacccacactgccaacagcatccgaacccgcgccgaggaacgttccaacaaagcttggcgcctgaaggaggagatcatctccaagctcggtctcgagaccaagccagaatatgtctcggacaaccaaccgctcttcggacgtggccttgagatggattcccttgacactctcgaagtcgtcgtcgccgtcaacaatgagttcggagtctcggtcaacgacgacgacgtacaggcgttcggctcgatcaatgccatggtcgatttcatcgaggtgaacgagaagtgagttctcttgcgctcgaggcgccacccaaggacgcccgtaagaaattcgcctacgacagcgatgccatcaagacgatgctcccacatcgttggccgatgctcatgattgatcgcgcctacgacgtcgtcccagggaaatcgggcaaaggcatcaagtcggtcagcgtcaatgagccgttcttcgccggtcactaccctgaccattccatcatgcccggcgtcatgatcgtcgagtcgatggctcaactcgtggccgtcatctacgtagccgaggccattcagaacaatcccggcatgacgtcgcacgacgcacgttcaagcgttggttatctcggcgcgatccgtcagatgaagttccgacgcctcgtcactccgggcgaccaactcaccctccacgcccagctcggcgagaaagtgggggctctgcgcgaggtttccgtgagagcactcaatggccgggatgtcgtcgcccagggggaactcgtcgtcaccgagcggtgacacccagccacacacgagaaggaagtcccatgatcgttcgcccctacaggccacgtgatgcggaagcgatcatacatctctacaacagccattccgactcccccaatccagtgtcgggagggattgttgaggaggagttccagagggagctcgaagaacgtggttcgacagtgttcctagtggccgaggaggccggatccattgtcggcacattcgggatgttccgcacgaatggccgacacaccatggccgatgatgaagtcttcgccgacatgttctatgtcaccccgtcacatcgactctcgacagttccgggacagctaatcactgaagccatcagcgagtgcttcatccagggcatcaacgtgatccgcctcaccgtgaaccccgcgaacatctccgcgctcaaggtttacagaaaagtcggttgtgcctgtctcggggccaccgatgcaggcgaggacgggaacattgagctgtacaacttcatccctctggttcttagggcaaccatcaccaaactcgaccacgattgtattcgagccctggcggacatgacttcgttcgcctgcatcaccgagggacgtccacttgatctgtcccacgacttcatcgtggacgctggacggaagatcgtctcccacagcatccagatcgggcgttcaaccatccacgccatggtcgacacgggctcgaggaccattgtggaggccaccctcgacaaccgcgactgggatgctcctcgccagatcgtcgcccccaccccctgtcagaaccggcccgaggaacagcgaggcaaccctgtccggctggtgcacaagaagcttgaggtcaccttcaacgaaggagtcattgagatcagtacgactggccactggggcccggtcctcgcaatgtcctggccctcctccgtctcgcaccgcgctcacgggtggcgacagggccccgccaagtcgtatcgatgcgagcttctcgagaattgcctcgtcctggatgacgaaggaggagtgaaatgcaccatcagcctcaatgattgccaagtcgcgatccggatggatggtgccccaaaaacggaattgagaatgtaccagtggtgcagcctgcgccagggctatctgacggctgacaccggcatcacgagcttcaaccgggcatccagtgggctcggagtcgccgtccgggactcgtccgagattgtcgccgcgggccttcccgtcatccctgacacaccgatcacatggagtgagggtgacatcacggttcagctcgatccctgcggccgcgcctccctgatccactcgaccctggtggaccgaagaatccacttggacgagtctggctcggcaagtctcaccatgaccgtgtttggtgattcccagccccatcgtgccgacaccgtcgagctgcctcccctcgcggcaggcaccgacaggatcgtcctcaagccggctgccggaggcgtgaccacatggcgcttgggcgccaccaaggtgctcaagtcaccgtggccacacgcccgcgcgctcgggcccaatccgatctggcgagccggcctgtgggtcagtcacgagccggatcgccacgaccgtcgccaaggaatggggtggggtcccgatcatcgcagttggaccctgtcggaagacaccatgaccagtactgacgggacactctcctggcgcttcagcggctcccccgacaccggctggacggtcgacgtcacgacgagcaacacgcacggggagaccgtcgtctggctcaccccggactgcccggcgggcgagaggatccgcacgtctgatcatgccgtgacgaccatgcttgacatctcgaagccatggcagcgctggaccacccgatgcgcaattcctctcagacacgggaagtggttcctcatcgagcctgatcatgacctcactgattcccccgaaatcctcatgcgctctgttcacggggtcctgctcgtcggctgtgtcggacgagcccactccggatccgcttcctggcgctttgccatcacgtcagaactccccacctccaacccaagaagaaacgactacacctcagccgcctgaacccaaccagttggaacacccactacagaagaaatggagcaccaccatgtccatcactgagcagtacaagacccttcgcacctcggtcggcctccacacgcctaccggtcccctggtccgtatcaccggtgatgatcgtctcgagtttctcgacaccttcctgtcccgcgcctcggacttcgtggaccccgacaccactcgggagtgcctcgctctcaccgaggacggccttccgctgacgatcttcctccacatcgagcgcgaggaggagtcatggctccttccccgcaccgccatcgatgcggcgaccctcgccacgtacctcggcaacctcgagaccgatggtgacctgtcaatcgagattgctccagagggttggggagctgtcgctgtcgaggggccgctgtcgtggcagatcgccgaaaaccttctcgacttcgacgtggctggcctcgttcttcacgccgtcacggacgtcgtcgttcccggggcccccgagggatcgaaggcatggctcgcccgggtcggaaccactggagagtacggctacctgctcgtctccaacgttcccgacctcgcccgcacttatctcctcagccgcgccacggagctgggcggtcaggcagtcgacgccgatgctctcgcacgagtccaggccgaggccgggatgccctattacgcgatgggcgtgtgccacctcgatgtcgccgggggtgacctcgcctggctcgtggactggcagcgcatcggcgagttccaaggatccgagaatctgcccacacccgtccgagaccagcgccgactggccgccatcgccctgcccaccggcaaccgcccggaagctggtcagaccgtcgctgccggggatgaggagattggaatggtggtgtacgtcaccccgtccgccaatcccgatgaggaactcgcgttcgcacttctggatgctcctttctggactcccacccttccgttgaccgtcggtgcccacgacgggaccacggtcaccctgccccgcgtcgtggcagcctccagcctcaacaagctggggtgacagcgatgacgatcactgctgagaacgccaccacccgcagcgacattgcccggagcattgcggtgaccggcgtggggctggtcacggcacagggtgaccataccgacgagtgctggaccgaacttgtcgatggggtttgcggaatcaccatgaacgtcacgttcgatgactctggcaccacgattccgtgtgctggcgtggctcccattccgaactctgattcgatcgaccgctgttacctgctcggcgtccatgccatgcgtgaagctctcgagatgagtggcatcgacctggactccgtgggtcgtgatcgcatcggactcgtggtgggctcaagcctcggcgcgatgcccaccttggaggcggctcatcgccgggccattgagaccggcgtgctcgatgccggattggcggcagactcccagctccactgcgtcgccgaccacctcgccgctgagttcgacatccgtggaccccgcgtcgtgacatcgaatgcgtgtgccgctggtgccgtggcgatcggctacgccgcagaactcctctggtccgacgatgtggacctggtcgtctgtggcggtgtcgatccactggcccagatctctgccaatgggttcacgtgcctgggagctctcgacaatctcccatgcagcccgatggccggttcctccggtctgactctgggcgagggagccgggttcatggtcctcgagagaacagatgcggcggctgccagaggccaggaggtgatggccgaaatcgccggctacggcacaagttgtgatggttaccaccagactgccccggacccgggtggcaatggcgcccgcagctcaatggaggccgccctgcgctcagctcatctcaagccgtccgacgtcagctacgtcaatctccacggcaccggtactccgaccaacgacgccgtcgagccgaaggcactccggtcattgttcaagtccgatgaccttccccctgtcagttcggtgaagggcgccatcggtcacactctcggcgctgctggcgccatcgaggccgtgtgctcgatcaaggccatccacgagggggtcctgccgccaaccgtcaacaaccgcgggcaggcttcccgaactggtctcgacatcgtgccggagtgcgcacgcaaggccgctcccgacgtggtcatctccaactccttcgccttcgggggcaacaacgcatcagtggtcatcaccgcacctcgaggaggcgttcactgtaccgccccggcgcagcttcgcgaggtcggaatctcaggaatggcagctctggcgggaaaggccgccaactcggaggagcttctttcggccctgtcagaagattgtccaatctggatggccgatgagaagacctgggaaggggatgctgtccaaaccggccatgtggacatcaagcgcctgtcccgcacaatcaacccgtccaaggttcgtcggatggaccccttgggaatcatctccagcgcggtggtgactgatctgtatgcccgacacgggaagctgagccgcaaggatgccgaaagcacgggaatcatcttcgcaaccggctacggtcctgtgacggcggtgacgcagttcaatgacgggatcatccgccacggttccgagggtgccaacgccctggtgttcccgaacaccgtggtcaacgcagccgcaggccacctcgcgatgctgaatcgctaccgtggttacacggccaccttggcatgcggtggaaccagttcactcatggcgctgcttctcgctgctcgcgtcgttggccgcggcgctgcggatcgcatcatggtcgttatcgctgacgagtttcccagcattgccgtccaggccgtcgcgaagcttcctggctaccgacacagggttgatggttccggagccgtgctctcggaaggcgcggtatgcgtcctggtggaggccgtcgaagtcgccgaagcacgcggtaccgcccccatggcgctgctacgcggcttcggatcccgtggagagtccgtgggagtcggtcacaccgcatccgatggacgggcttgggccaaggccatggccgctgcactgggcccggccggcctgactgcctccgacgtgtcgaccgtcgtggcggcatcaagcggacatcctcgcgtcgaccgagccgagcaggcggccaggcggatcgtcggactgtccgcaaccgctacgaccttcccaaaggcgattgtcggagaaacacacggatcggctgccgggatcgggctgttcggtgccctgtgcggttcgaggtcagccgcgcaccagaacatccttgtcaacgccttttcccacggcggtggttatgcctcgatggtggtggagtcactgtgaccacgacgcttctgccacgggttgcccagccgggaccgggcgtcagccatgtcgacaccgaccgtcccatcgagtgcatcatcacccaccacccccacatgccgcgtgatcgcggaggccacgccacctccgtgtcaggcaggtacttgctgcgccaagccgcagaactcatgctcggcacggatcctgcgcattgccccgtcgtcgacccttcgcggcgctggtactggcccggaatcaatcttcacggttctgtctcccatgtcccgggctggagcctgacgacgctgagcaccggcggccacatcggggcagacatccaggacttccgggagcgtcccggcgcaatggcattcatcggtgacctggtcaagctgtcgcgatcggcgtcactccgagaattcgcggagtgcgaggccgtcgtcaaggtgtccgaattgactaaggagacgttcgggcacgtgcgactgcccgaatggacacccggatggcgccacgttttcgaggactactgggtctggagtctcgagatgcacgggatgggagtcatcgcactcgcatccgatctcccccgagccattcgctggtggcggtgcgacgccgatgcccgtggccgtctccaggctctccgacccataagcagtcttggaccaggaaggccgtcatgagccggtactcacgtcgaatctcaggcatcgaacgcggctatctcaacgccgcaacccggggcccgcaccccaccatccacacgatgatcgacttcgagggccgcgtccccgccgactgttggcggcacgcatccacgattgcgtcggccgccaaccctggcatgacagtggtccggaggtcgggccgatggacatccgatccagcgggctgtccggttgtgttccacgactggaccgcggaccccaacgacgttgccgacttccacgctgacatggatctcgtgacgggaccatcgtccacgctccacgttttcgagggggcggaacgcacccgaatcaccttggcagcaagccatgccgtgaccgatgggcggggcatcgaacgatttctcgtcgacctgcttgcagcgttggacgagcgtgaacccattggaagccccgacaccctgaccgatgtcgatatcaaacgatccttggagaacagcatcaagccccgacgccacctggccgctgtgcccgccgatgtcctttctccactgggggggaggaagaaccaacgtatatgggcctccaggacgtggcacagtgccccgggagccatgagcggaagaatcgctgccgctgtggccgagatgatcgaccacgccgcaatgatcatcatcccggttgacatccggcggcacgtcccagaggtccgatccacagcaaacctaagtgcccaactgccagtgatcatcaccccgaaccagcgctggcaaagcatccatgggcatctgctcacggaccttgctcgccatcgagaccttgcgatcatcagtgaggatttccgccacaacaatccgttcgcatcgaccttggaggaaagccaggccatcggcctcgatggtgtctatccctgtgccgcaatcatctccgaccacgggaagctcgacctttcaaggttccagaccttggaactcaccccggtctcgatgcgaagcctcccgatgctcgttccctactccgcaatgttcatcagcagttgcaccgtcggcgagaccaccactgtcaccatcgctcatcgcgctgatgacgatcccgattccataaacaccttcttccaccacatcgaatcccagatgtccatctgagccacgtcgtccctggagagcaaacatgaccacccaaaatgtcatcaccccgccgcgccccgtcacctcccatgccacggcgaccaggtccgaggctccaccgcgaagcgtcatcagagccatggccatctcgatggtcgcgaccctcatggtcatgctcgacacgaccgtcgtgaacgtgtccttgagcgcgaccaccgcccgcttcgggagcatgggcagcgtgcagtgggtcctcacaagttacctacttgcactgtgcgcgacgatgacggcctccgcctgggtcatcgaccgccttggtccacggctcaccttcatcgcctcaatgaccatgttcctcatcggctcggtgatgtgtgcactgagcgattcagtgtggcaactcgtcactggcaggaccatctccggtgccggagctgggatccttgttccgacagcatccgtcctgcttatccgtggcatcccacgcgaacaacttggcagggtgcaggcactgaatgggagtgtccagttgatcgctcccctgatcggcccgactgtgggcggtctcctcgttgacaggtgcgggggctggccggccatctactgggcgaacgtccccgtagctcttgttcttctgattgaggccgtccgcgtcgatccggacgaaccacacaccgctaagcgccgcctcgatgctctcggcctggtctgtggcagcaccgcgatcgtgctgacagtgcttggtgtctcactcttcggcaggacgtcgcgaaacaccaccttcctgcttacgatcggcgcgcttgcagtcctcgcatgggcgttcttcatcacccacatccgaagggctaccaaccctctgcttgacgtttccctgtatcagaaccctgtctattcatggtccagcttcaacgtagcggtgcttggtttcggtctctacgcccccatggtcgtcatgcccctctatctcgaggcgacgcgccacctcactgccgtccacactggtctggtgatgtcagtggccggcgtcggcgtcattatggccggaatcctgtgcacgaagatcatgggccggatcggtggaggcctcacgatgacagttggcataactctgagcatcatcgccactctgcccctggtccggctgacgaaccacacctcctacatactcctggcagtctgcttggccttgcgtggagcaggaatcagcctgacaatcgtcccagccatgacacgggccttcgagtccatcaagaggacggccatggcggacgcctctgcacagctcaacctgttgcagcgaatcggcgggacaattgcgacagcagtcatcatcgcagttatccaccacgaggccatgctcacccgcggactctcccccacagtgttctcgcacgccaacgtgtggatcctcaccgcgaccgccgtcacccttctgccggccttcgcgcttgcgaaggccgaaagacaacagcaggatctctgagcaccgaggagtactccctcgtagaccctcctctgatctaattgggttcgttccaagtgtgtatctcactccggggagccccgattgctgaaccacatcccgttcaccctggcgagtccctcgtggtacgacgtcccctgggcgcccggatctccgtatctcacaggagatatctcggtcctgccagcggactcgccaaggtggacgacgaccatccggggtccttggcaaatccacatgccacctcgtccgacccttccagaggtggggtggaaagtgcatgtgtctgccaagccatcggaattggaatcggttgcctcagtcgtagcactgtggtgcgtacgccacagcgtccccttcaaagtacttcgcacccgaggtctcgttcacgcgagtcaagtcaagtatgcggaccgaagtcagagcggcaaggtctgcacctgctaccccgacggcgagagccttgagcacttctgctccggtcttgccgagctgcttcagaacgtcgattcacctccggtgtccggcgagctgcgagtcggatcctcccctctgtggttgcgtcacgggagtttccgagaggcatgggcggtgtcatccacaggagtaccgttcccggtctacccgggaacaacacatcctgatcgtcgaggccccgcgcccgcagaatccgatcacgacacgccgtggatccggaggctccgtcggacgaatcgccccagcacggttcttcccatcgacgatgtcagactcctccaccgatcaaatgctggcggcgtgtatcaggcaacatggagagacggcacatcggtagtcgtcaaggaggcccggcacctgtccggacttgatgcggcgggtgtcgacgcccgagtgcggctgcgtcacgagtacgaggccctgagaagactggacccctatcgggccgctccccatcccattgatctcattgagaccgaggacggctcgttcctgatcatggaattccttgacggaatgacagtccaccaggagatgtcgaggttccatcctctgattagtaggcgacctcatcggctatcgatgaccgatttttcacgctggtgccgagaggtcgaagatcgcttgaggaatgtcacgagggtcatggccgggtgcggaatcgttcacggggatcttcatcccgcgaatctgatacatgtcggccatgaggttttggttactgactttgaatcctgctcaatcgacggggtcgccgtctcgtcagggatcgccgctccctggttccagtcggacgacacgattcccgatccggcgacgactgacgatctccacactcttctcgtggatccgacttgcggccccgcgcttgtcccccatccaaatcttcgcgcgctcatcagccaggccgcagtcgaggacatgatgggaaatccgactggtttaccacatgcctggaacctcgaggacatgacaagcgaactcgccaaggggatccgggcatcagccactcccgcacgagccgaccgcctctttccctcagacccctacctgttcgggcatccaggttcagaattcggcctgatgcatggcgccgccggaatcatggctgctcttgccgtgactgggtacggtgttgacgcgaatcacgtgacctggatgaaggaccgcttggccacccgcccgaccctgctgccggggttggccaacggaatcgagggaattgccctgggtctctccctgtgcggtcagaacgacatggctgcatccctgctccaccagtccggaattctcacgatcacaacgaacggatcgactgacctcaccctcggtactggtatggcgggccgagcgtgcgcgctgcagtccctctcacaacgactgtcatcgaaatctctcgcccacgctgcatataccctctgggaacaactcgccgtggctgtgcggaacactgatgtggccttgccgaacggcctgttctccggttgggagggaatcgggctctccctgcttgcctctcccctgccggatcgtcatgatctcgcccgccactcactccgactggccctggccacgacaacgattgttgacggtgcgctcttctcaggcgagggacagatccgatggccatatctggggcgtggtcccgcggcatgtggcccgctcgccgccaggcttgatgatgaccagacggccaaggccgtggcacagacctgtcgttgtcccctgactgagtcatccggtctccacaatggccgcgcaggtctcctactcgtcctccgccagctcgtgggagaccaagacgacgccgttcgccgccacctcatgagactgtcgtggtcgatggaccgtcgcgaggaaggcacattgctgctgggtgatcatggcctgcgtttctcatccgatctcgcgacggggtcagccggcgccctcctcgccctgagcagggacccatggcggaacatgacacgaatgctcggaatatgcgatgacacctgtcatggcccactagtgacagtttgatctagcgccgatagttcacaactgaaagactccaaacatcgaggaaaacatgctgagccaaaacgccttggcaggcgtggctcgtttcaccacgatgaacaccaggagacagaatgtccgttgaggccatgcaatccatcgagatggacgaggaaaacagcgccagccagacagtttgcgcttgttacagcttcttctcgtggtcaggatgctgcgtagtctcccaagcggtggaagcatcttgatcgtgtgagacgccgtcgactaccctgtcccccgtggtacgcacacgccccgtcctggacagtcccggaagaccgctcatcgcctccggagtcgtcctggcggtcctgctcatcatcgcggtgatgacgatggtgcttcagcgcgaccccactctcacccccggacgccgcattctcggtatcgtcctgtccacggtccaggccgtcggattcatgtggctgcagacccgcatggttcgtcacggcaagggttcgcgcaacatgcgtgcgacccttggaagggtcggtttctgggccacgtggggactcgtcgcagtgggagtcgtcaatctgtggctgaccaactcgtggaccctcttcggggcctccgtcgccacgcccctccttctcctgccaggggtgtggagtgtggtggccaccctcgtgaccctgatcgtcggtttctccgacctcgtggtcacccacacctcgccactgacctcagccacggtcgtgctggtgaccatcgcggtgtcggtgaacctctacgcattcacgaagctgtcgacggcactcgttgaactccgctcctcccaggaggagatcgcccggctgcgcgtggacgccgagcgtcaccggatatcgcgggacctccacgacatcatcggtcgcaccctggtcgccacgtcgatgcgccagcaggcggccctccacctcgtcgaccgcgacccgcaacgggccaaggaacagctcgacgccgcccatgacgcaatcaccgaggggcagcaccagttgcgttccatcatccaggccgagatgagcaccagcctccccgacgagatcagcgacgccacattcctgtgcgaccgactccacatcgacttccgcatggatgaccgcggcagaccgcacaaacccttcgactcggcggcggcggcggccctgcgcgagggaatcacgaacatgctcaagcacagcgcggcgggctactgccacgtcgccatctccccggacctcctgaccgtcaccaacgacggttgtccgcaatcacctcgcccctccaccacaccgggcaccggaatcgaccatctccggtcccagatcgaggcgctcggtgggtcggtgacgacgtcgcggccctcgcggggcaccttccggctccgctgctccttcccgacccggggggcgtccacgaccacacccgcgaccgaaggaggacgatgacgacgagaatcctcctcgccgaggacatcaaactggtggcagaggccttcgaggcactgctctcggtggaaccggagttcgaggtcgtcgcacgggtggcacgcggcgacgacctggtcacatccgccacccgcctgttccccgacgtgatcctggccgacatcgacatgcccgggatgaccggcatcgaggccacccgaatgcttcgcgacaagggataccgcggcagaatcatcctgctcaccgccctgccgggaagcgggcacctgcacgccgcgatggctgccggagccgacgggtacctgctcaagtcgatcaccgcgccctccctcatcaacgccatccgggcggtgtgcaacggccagtcggccatcgacccgaacgtcgccgcggtcgccatgcgcaagggaccctcgcccctcaacgaccgggaaaccgagattctgcgcctagtcgccgacggttcctccaccgcgcagatcgcctcgcggctgtacctcagcaagggcaccgtcaggaactacctgtcgacggcgatgtcgaagctcgacgccgactcacgcacagcggcggtcacgcgggcacgcgaggagggctggctgtagcaggcgacccgctcagcccaccgcccctcagcccgccgactcctgacgcacggcctcctcgaccgcccggctgagcagggacccggccctgaccatcgacgtctccgggtccggctcgaggtcggacaacgcgatgatccggtcgaacgcggaccgtttctcctcgggcaggtcacagcgtccgcacaccgcccagacgggcaccccggcgtcccgggcgatcttgcggatggtgtcgggaagcttgccgagcagggtctgctggtccagccgcccctcccccgtgacgacgagactggaggcggagatccgcgacaccgcgcgggaccatcccaggacgaccgccgcgcccgggcggtacctggtccccaggcacatcagcgcccagccgacccggctgggcggctgcgaaccccctggccaccgcccggcaggcctttcccgaactcagcgaccccttgaaggagtcgacggcaacgatgaccggcgcattcggatcaggacgcatgggatcagcatgtcacgtcgatacggagcagtcgcgccgcctacccctagactcgggggcatggtcaaccgagtctacctgtccctgagcgttctcgccctcgtgctgtgggtggtcgcctaccgtcacatgccgggctgggccgcgggcatcaccctggtgggcatcgtcgtgctgtcgctgtggtgcgagtggtcgcgggtgcgcaccctggccaggatcggcaagtcccgccagcagggcccccgctcctcccgaggacgcaacctgtcgtgagcaatacgattcccgcagccctccaccccggccctgacgaggcc

SEQ ID NO: 428 - DNA, 26620 bp, Propionibacterium acnes
  source 1..26620: mol_type = genomic DNA
ccttgtggacaccacgtcatccacatgacttgtgtcacatgattcccggaccatcatcaagcagatgctcacccaactgtaatgatttctgttctgaatctggacatgctctgacctgcattcaatgatcaattccgtgcgatattccacaacgcacggggaggtcgcagacaatgacaacagaaagcatccccacgcggctgctcgtgtggcacgagcagaccgatccgaccaagctcctcaggatcaccgacgcgatcaggaggggggatccccttccccccatcgaggccatggcgatcggccacagattcctcgtcctcgacggtgcgcaccgggcccaagcccaccagtactgccatcgatctgagatccgagcccgcctccacaacctccccctcagcgcggaaataccaggctggagccactccataccccgcgatgcagcagcgaaactggctcacctactcctccccgtggacgctctcggtcaggcggaaatcgtcctgcacggggtgcgccgtcaggtggggaccgcttcacaacgaccgcgcgacatctttctcgcctgccaccggatcgcgcgagttgcctacgcgcatggaatcagacctctcggcccggagttctccaacgctccgacgatcgacgccgccaccatgacctggcgcccgccgaacgtgggcacgttgtgggccatcgccagcagtctcggacccctgcccgcaactgtgacccggttcgccccgatcctccggcacgacgccatcggggattccgcgatgacacccgtcacctccgccgcgtgacgacccgcgccaattccgccccaccactggatgaggggcagccgcgtggacgatgctcctgttcaggcagggactccatacgagaccaataggaaaatcatgatcaaaaacacaagccctctgaccgtgaaaaatgtctcgaaaacattccgtggctccagcggagaagccatcaaggccgtgcaagacgtgtcattcaccgttgagcgtggtgaggttgtggcattcctcggcccgaacggcgccgggaagtccaccaccatcgacatggctctcggcctcacccgccccgacagcggccagatcgaggtcttcggtactgacccgctcagcgcggcccggtcgggacgctgcaccgcgatgacacagaccggcgggttgctgcccgacctcacgattgggcagaccatggagatcatctcctcgctctatcgtggctcccacatgaatgcctgcatggagcgagcaaggatcacgcatctggccgatcggcaggtgtcgatgtgctcgggaggcgagcgccaacgacttcgcttcgcactggctctgctgcccgatcctgacttcctcatcctcgacgagcccactgcggggatggatgtggaggcgcgccgggacttctgggcagagatccacgaggacacgcgtcgtggtcggacaattctgttcgcaacgcactacctcgacgaggtggacgagttcgccgatcgggtcatcctcatcaaggagggccgcgtcatcgccgacgacacctccgacgcgatccgcaccatgtcggggggttgcaccgttacggcgaccattcccgacttctccctggcacgactgaatctgccgggcacccaactcatcaagcagggcggcgcacgcgttgatctgcaccatcccgattccgatgccctcgcagcgcgagtcatccagctcggcggcaccgacctgcgcgtggtcccccgcagcctcgacgacgccttcctcgctctcacctcaaccaccaaggagtcctgacatgaccgcccaagcgcttcccgcagtcgccactcccaaggcccgccaccgatccgccatctcgctgaagtacttgtggtgcgagatgcgtcgccccttccggcgttcgacgatgctgttcaacctcgccctccccgcagttctgtacctggccctgttccgcaccgtccacaccgccgagctgccggacgggaacttcgcgatgtggatgatgatcggcatcgctgtctacggagcggccactgcgagcaccagctacgcagcctccatctccgtcgacgaggccaacgggtggacccgcaccatccgcctgacgccgttgtcgtcggtcgggtacgtgctggtgaaggtcctctgcgccatggccatcgccctggccccgaccctgctcatcggtctcatcgggctgttgaccggagctcacggcacgctgcgggtctgggtaatcggactgggggcggcttggctcagctcagcaatcttctccgccttcggcctggctctcggactgtccctgcgtcccgaggtcgtcatgcacgtccccggcctggtcatcaccggtctggcgttcctgggcaacgtcttcgtccccctcagcgggacgatgctcaccattggccgctggagccccgcctacggcatcaccgcgctggctcgttacccgctcaccaacggcatcgacatcgggggcggccacgactccctgacggctgccctcatcggcaccttctgctggttcgccggattcgtgttctgggcctcccgtcgatttaccaagagcacgggtcgtcagtgacagattcggccgatctccggaaggagcagtgttatgaccaagcccctcattgcagtggtcaccgcgggccaaggagcgcagaagcctcgcctgctcacgccatggctcaaggtccccggcgtcacggagaagcttgctgcatggtccgctcaggccgatgtggacctcgtcgagctcggtaccagggcgaatgcagaaaccttggcagcgaccgagaatgcgcagccactactggtctgtctcggagtcctcgtctcggatctcctggccgaccagaacattgtgctcgcaggacactccgtgggcgagctgacagcagcgtgtctcgccggggtagttgatcccgggacggccgtcactcttgcacgacggcgtggactggccatggcgcgggcctgcgctctccacccgaccaccatggcggccatcattggtgacaatccggatgacgtcctccggcggctctcggaactgggactcacggctgccaacatcaacggaggcggacagattgttgcggccggctccaccgacgcgatcgcggaactggtggcgacccctcccaacgggaccgcagtcaagccgttgcgagttgctggcgcctttcacaccaagtacatgacgcctgcgcaggacgctttcgcccaagctgctcaagacgtcaccttctccgacccgcagcacccgatcatctccaacctcgacgggcaggagatccggtccggcaatgacctgcgtgaacggctgattgcccaggtgaccgcgccagttcgatgggatctctgcatccagcagatcgcggatcgtcagccggaactcgccctatcggcccctccggggaaggtgcaggcgtcgctcttgtctcggcagatcccggacctcgcgacggtctgcatcaccacaccacgggaggcagcccaggctgcacagcggatcgaccagtccgtatccgtccttcagggggcatgatgctcatccccgagtacttcctcacagcctgttcggaccatgctgagcgcctggcgatcatcacccacaatgacgttgtgacgtgggccgaactggcgactcgcgtcgacggttttcggcgctggctgcgggaccatggcgtgcaccgccaggacagggtcgttctccagacgccaagcaccgtaggcacggtagccctcatgtgggcctgcctgctcgacggcgtgacgatggtcccggtgcaccaggacctcactgcctcccaggtgcagcaagtcatcgacgactgccgtccagctctggtgtgtggcagcccggacctcgtccaactcctcaactcccccggaatgaagacaagcacacctccaacgcggccggagtcaacgagtattctgccgtccttgtcccgggtcagccccgatgaccttgcgatgctcatctatacgtccggcacgacgggtctcccgaaggggatcatgtgtccccaccggcaggtcgccaccgccgcacggatcgtccatgactgtctcgggtaccgcacggacgacgtcattctctgtcgcctgccgttgtccttcgactacgggctctatcagattctgatgtctgccatctccggtagcgcggttgtcctgcgggacggaggcgcgcaggaccgcaacctggtgcgcgacatcgcccgtcacggcgtcactgtcgttccagtcgtgccgtccatggcgtcaatgctcatcaccctgcagcgtcgtgatcagttgccgaccatcgtcagactgttcacgaataccggggcgcgtctggcacccgagaccgcgaaccagttgctcgcaagcttccccggctcccgctatgcgtcgatgtatggcatgacggagtgcaagcgcatctccatccttccggtggaggagtacgagacgcatccggacagcgtgggaagagctctgcccagcactcacgtcgagatcgttgacgctcagggagttccggttccggcgggcgagcacggggagatcacggtgtccggcccgaccgtgatgaacggctactggcaggtgccgaacagtcccagtggacgattccgacccagcggccacggcctcactctgttcaccggtgatcgcggctggatggatgaggagggacgtctctacctcctcgggcgcgacgacgagatcgtcaagcatcacggcatccgaatcagcctgcaggagatcgagatagccgccgaagccgcgccgggcgtcgacgcagtcatcgctctcaagccggcctccgactcggcccccattgaaatcgcctactgcggcagcacgagtcccgagaacctggcccgccatctcgaaaccgtcctggaccgggcgcgacgaccccaattcatccaccaactccagcagatccccctgacccgtaacgggaaaccaaaccggtcagcagccgccgaggccatccgctcaagggcgtgacggcgaaggccaacacccacagacgaaaggaaaccaccatgacccaggccgagttcaaccagttcatcgagtccacctgctccgcgacgatcgtggatcccgaccgtcctttggtcgatcagggcatcgactccctcggaatgctcaccctcatggtcgctatcgaggacagcctcggcatcgaactggatcccgagtccctcgccgacggtaggggttccacgccctccggtcttctgtcccttgtcgagcagccgaaagcgacggtgtgacgacatgacgacgatggttccttgccgccgtgtggagatgccgcaactgttcgaccacatccccggaagcatctctctctcaggagggctgcccgatctgagcgtgctcccgagcaatcagatcgccgaactgacgtcccggatcatgcgtctcggctcaagaatcctcctgcaatactccaccccttcggtctcgtcctccttggtgccggccatcctggacctggcggaacgaacatgcatgtcaccggatccgcggaatctgatcccgaccgcgggttcccaactgggcctggccatggtgatcaatgcctttgacggcgatgagatcatctgtgactgcgccacctatcccggggcgctggccgccttcgcctctgccggcgtggaaacaacgggggtggccagtgacgaggaggggctcaacccagacgcgctcgctcacgccgtcgcagagggtcgggccaatggccgccgcatcgcagccgtctacaccacgcccaccttccagaatcccaccggctccgtacagtccgagaaccgccgtgcggccctgctcaaggtgtgtgctgacaatgacctcctcctcatcgaggacgatccgtacggcatgctgtccttcgacgggcagacgtggccagctctgaagtccatggacccacagcgcgtcatctacctgggcaccttctcgaaggtgttcgcaccgggcgtccgttccggctggatcgatccgcccgccaatcttgtcgagaaactccgcgctgtgtgcgagatcatgacactctcgccatcagccctcaaccaagcgatcatcggcgagtaccaccgtcgtcacggatgggacgaactgttggagggctatcgcgcctcctaccgcgaccgagcccgtctcctcatcggggctctcgaggctgaactggcaagaacgaattgcactggcacgtggacctggcgtgaaccacggggcggcttctacctgtggttggagaacgtcgccagcaccagcggtatcgacgttgcgcgtcgcgccgccgacaacggagtggccgtggtgcccgggaaacacttcgacgcagccggacacgattcgccgagcctgcgggtgtcgttcagcaattcacgcccggctgatctggtcgaaggagctcgtcgtctcgcccgtgcactggtgggagaggacgttcagaaatgactctcgcgacacgcaccgccaccgacaccctgcagcagaccttgccctggggcacccacgaacgtctcgtcttcgggcgggcgctcctgcgcagcaccggcttcccagccgaaggcttggccctgctcgactccgacgacatcctccccctcctcgactcctttcttgccggggacatcgacagaactcacttcgagaaggaatacaccagtcgcgaggagtccggcgcaagggcgctcatcaacgtcttgaaggacgatgcagtatcgcgcgccatcgcatggcagaaccccaccgcgtggaggtccttcgaatccctgtcgtccacgagcggaatcaatgcttcgactcggcgcaaggtacgccaactcgccctctactggcaacgttactgttccaaggctgagaccattggatacttcggcccgttcgcctgggccgaagtcgacccggaggcctctgcggtcgaattcatctcctccgaccatctgatcgaccgttcccacgtcgcaatggaggcgtgggcggtcattgagatcgggaaagccctggcatcacgggccgaccttcagtggtggatgccaccaatcctgtcccccgccgtcgacctcaacatggagagaggcaccgtgacggtggctggacaccagccacgacgggtccgggaggacgaggcacgagttctcttcctgaccgacggcacccgtcccgccgcccagatcgccaagagcctcgacatggagcccgagcggttgcgcaggatcctcgtggcccatgaacgtcgtcacaccgtgatctgggacgccaacatccctgtctcagtgcacgcgtgggacatcctgcacgaacgcattgcccagatcggagacgctgggctgcgagatgaggccactgctgttctcacgaggttcgacgagcttctggaggtcatccgcaacattcccgacgcccggtccctgacggaggcgacggaatccctgtcccgtcttttcgaaaccgtgacaggaacctcttcgaacagacgtgcgggccaggcatatgcagcccgcagcctgtgctacctggactgcacccgcgccggaaccgccaaggttgggacccggcttctcgaagccctcgacgcccccctcaacctcgtcctacaatccgctgactggttcgcggcgaccttggcaaaggaatacaccaccgaaatcacggacctcgcaaatcgaaagcagcgggcctcccaccagccactgaccatggctgatgtctggccgtccacgatgtcgctgttctggggggactcaccgtccccactgcagcgagccgtgaccgaactgtcacggcggtggagcagagtcctcgaggggctgcagccagtcgacggtcgcatcgacacgacatcgtccgctctctcgggcgccgtggacgagcagttccccgtgtgcaccccgattccagaactgtcagtgcacagcccggacctccaggtcatcacctcgagcactagcaacatcgcctccggacgagtcactgcagtcatgggtgagctacatgcctgtctgagcagtctcgacatgccgttgctcgagtggtcgctgccccatggttccattcgcgatcgcatcaacaccgcgctcaacctgcgacgtctggttcccttgttccccgagacatggaggcgcaacaccggccgcatggttccagcgacggtcggagtgggggatcgcgcaatcgggttcactcggacggccgatcaagaccgtgcgaacacatggtcgatgtcggcactgctgttcgagcagaccgaggacggactcatgatccgtgatcccgatggcaggctctggaccatcgcacaagcgtggagcgtgcccatctccatggtcgccgccgatgcgttcaagatcgggctgcccggctcaccagcccctcggctcaccattgacaatctcgtcgtgttccgtcgtacctggaggtttcccgctggctccatcgacatcatgcacggttcagccgccgagaaacacgctcggctgagggagtggcaggtcacgaatcaccttcctgaccacctcttcgtcaagttcccctccgaacccaagccgatctacttctccttcgagtcccccgccatggccacggtcttcacgcgatcactgcagcgcgacgcccgagagaatccagacagtctcgtgacgatgtccgaagcactgcccgagcctcaatcctcatggctgcacgacacccggagccaccactacgtccacgaattccggctgcaactgaccaaggagcgacatgacgaccacagttgagacacatcccgaaacacgtggcacaaccgcgacatccatctccaatctgatcggtcacacccctctcgtaagaatggaccatctgttcgacggcctccccttcgaggtgtacggcaagctcgagaagctcaatcctggcggaagcatcaaggatcgagcagcacaatccatgatcgaacgggcaattcgacggggtgagatcgtcccgggccgtacgaccgtcatcgagtccagttcgggaaatctcggcatcgccgtggcgatactgtgccaggagcacggcctgaatttcatctgcgtaaccgatgccaaggccacgccaacgaacattcgactcatcgaagcgttcggggccactgttgaggtgatcgaagaacctcatcccgagagtggcgaattcctccccatgaggctcaagagggtaagagaactgctgtcagagattccagatgcatggtggccgaatcagtacgggaaccccgacaatccggcggctcacgagcggactgtccgcgagatcatcgaggcaatcccgcgggttgacacgattgtctgcgcgaccggctcgtgcggaacccttcgcggctgccacgaagcattgcgaaagctgtccccacgcacccgactcgtcgccgtggacgccaagggcagcgccatcttcgacgaggcaggagcaccccatccccgctgtgtcccgggacacggtgcgtcagtgcgaccgccgctgtggcgcgcggggctcgccgaccaactggttctggtctccgacgcggactgcgtcgtgggatgccaggaggccctgcgcaccgaggctcttctcctcggcggatcctcgggagcaattctgacggccattcaccgagtgtctcccacgattcccgctggttccaccgtggtgacgatcctccccgacggcggcgagcgctacatcgacaccatctacagccgctcgtgggtcgactcacacatccccgggctgccctctctcgccgactggggggctcccaaccccgccaattcgtatgacctgaacagaagtgcctcatgaagctctacaccagagagaccgtcgaaactgcgcttgtcgggcgtcatggccaggttctcagtgccgtacagagtgcatacatgctgcattcgacgggagagacatcgctgccattctcaaccttcctccgcccggccgggtatccgaacgatcggatcatcgcacttcccgcccacatcggaggcgacttcgacatagccggtatcaagtggatctcatccttcccggaaaacctcgaccggggccagcaacgagcttcctccgtactcatcctcaatagtctggagacgggatacccgaccgccctgctggagtccagtcagatttcagcaacgcgaacggcagcatcagccgccctggccagcgccaccctccatggctccgaagaccatgtcagcacgattggcatcatcggctgcggaacaatcaatcttgcaacgatcgactacctcttccacgtgcacccccagatcaacgaggtcctctccttcgatctgaggcgggagcgggcccatgagttctcgcacctcgtcaaggcttcgcacccagaggcccgggtccgtgtcgccaaggagcccgacgagattctggccgcaagcaacaccatcgcgatcgccacgaccgactcgagtcattggttggaccttccgccgtggcacgggccggggcaccaagtcgtcctgcacacgtcgctgcgagacctgtcagtgccctcgatcctggcagcggccaacgtcgttgacgatcctgatcacgtctgccgtgaagcgacgtccttggatctggcaactcagcagaccggcaaccgggacttcatcacggggagaatcggagacctccttcttggcgcgccgctgtcctcaagtcctgactcccgtgtcattttctcacccttcgggctcggcatcctcgacctcgcagtcgcctccgtcgtcattgctgccgcctcctcttcagcagtcgagatcaatgggttcgaccccgggaaacacgccacaagcatgattgaggtgaatcgatgaccaccacacagatcaacgacaacacggccgttctgcgcgacgtattccccgccggctccgtcgcattcgtgagcggtgcctcacgcggaattggcgctgcctgcgcgacagcccttgcggccgcgggatgcaacctcgccatcacttatcgaaggaaggagaacgaggcggcacaaatcgccgaatccattgaagccatcgggcgccagtgcatcacaatgcagatggacgtaaccgatgagaaccaagtgaccagagccttccgcatcattcgccagcattacggacgcctggacgccgcggtcttgaactcgggaatcaccagtgacgggcatcttgcaacaatgagccgctccaagtggagctcggtgatcgacacgaatctgaccggaaccttcctctgcacgcgcgaggcgaccaaggccatgtactcgtccggtggctcgatcgtcatggtcgcgtccaccagtggagttgcagggcgaccgggccaggccaactacgcagccagcaagggcggaatcgttgccatgatgaagacgctggccccggaggttgcggcaaagaacgtccgggtgaatgcggtggcacccggcttcattcagaccgacatggtggcggccgttccaaaagcggcactcgcccaggcaatccaacacatccccatgggccgtcttggcctggcacaggaggttgcgtcagccgttaccttcctggcctccccgctcgccgcctacatcacagggaagaccctcactatcgatggcggaatgatcaacggctgaccccaggacccgcacacccccagtaccgagaaagaaacaacaatgaccgagatcacccacactgccaacagcatccgaacccgcgccgaggaacgttccaacaaagcttggcgcctgaaggaggagatcatctccaagctcggtctcgagaccaagccagaatatgtctcggacaaccaaccgctcttcggacgtggccttgagatggattcccttgacactctcgaagtcgtcgtcgccgtcaacaatgagttcggagtctcggtcaacgacgacgacgtacaggcgttcggctcgatcaatgccatggtcgatttcatcgaggtgaacgagaagtgagttctcttgcgctcgaggcgccacccaaggacgcccgtaagaaattcgcctacgacagcgatgccatcaagacgatgctcccacatcgttggccgatgctcatgattgatcgcgcctacgacgtcgtcccagggaaatcgggcaaaggcatcaagtcggtcagcgtcaatgagccgttcttcgccggtcactaccctgaccattccatcatgcccggcgtcatgatcgtcgagtcgatggctcaactcgtggccgtcatctacgtagccgaggccattcagaacaatcccggcatgacgtcgcacgacgcacgttcaagcgttggttatctcggcgcgatccgtcagatgaagttccgacgcctcgtcactccgggcgaccaactcaccctccacgcccagctcggcgagaaagtgggggctctgcgcgaggtttccgtgagagcactcaatggccgggatgtcgtcgcccagggggaactcgtcgtcaccgagcggtgacacccagccacacacgagaaggaagtcccatgatcgttcgcccctacaggccacgtgatgcggaagcgatcgtacatctctacaacagccattccgactcccccaatccagtgtcgggagggattgttgaggaggagttccagagggagctcgaagaacgtggttcgacagtgttcctagtggccgaggaggccggatccattgtcggcacattcgggatgttccgcacgaatggccgacacaccatggccgatgatgaagtcttcgccgacatgttctatgtcaccccgtcacatcgactctcgacagttccgggacagctaatcactgaagccatcagcgagtgcttcatccagggcatcaacgtgatccgcctcaccgtgaaccccgcgaacatctccgcgctcaaggtttacagaaaagtcggttgtgcctgtctcggggccaccgatgcaggcgaggacgggaacattgagctgtacaacttcatccctctggttcttagggcaaccatcaccaaactcgaccacgattgtattcgagccctggcggacatgacttcgttcgcctgcatcaccgagggacgtccacttgatctgtcccacgacttcatcgtggacgctggacggaagatcgtctcccacagcatccagatcgggcgttcaaccatccacgccatggtcgacacgggctcgaggaccattgtggaggccaccctcgacaaccgcgactgggatgctcctcgccagatcgtcgcccccaccccctgtcagaaccggcccgaggaacagcgaggcaaccctgtccggctggtgcacaagaagcttgaggtcaccttcaacgaaggagtcattgagatcagtacgactggccactggggcccggtcctcgcaatgtcctggccctcctccgtctcgcaccgcgctcacgggtggcgacagggccccgccaagtcgtatcgatgcgagcttctcgagaattgcctcgtcctggatgacgaaggaggagtgaaatgcaccatcagcctcaatgattgccaagtcgcgatccggatggatggtgccccaaaaacggaattgagaatgtaccagtggtgcagcctgcgccagggctatctgacggctgacaccggcatcacgagcttcaaccgggcatccagtgggctcggagtcgccgtccgggactcgtccgagattgtcgccgcgggccttcccgccatccccgacccacccatcacatggagtgagggtgacatcacggttcagctcgatccctgcggccgcgcctccctgatccactcgaccctggtggaccgaagaatccacttggacgagtctggctcggcaagtctcaccatgaccgtgtttggtgattcccagccccatcgtgccgacaccgtcgagctgcctcccctcgcggcaggcaccgacaggatcgtcctcaagccggctgccggaggcgtgaccacatggcgcttgggcgccaccaaggtgctcaagtcaccgtggccacacgcccgcgcgctcgggcccaatccgatctggcgagccggcctgtgggtcagtcacgagccggatcgccacgaccgtcgccaaggaatggggtggggtcccgatcatcgcagttggaccctgtcggaagacaccatgaccagtactgacgggacactctcctggcgcttcagcggctcccccgacaccggctggacggtcgacgtcacgacgagcaacacgcacggggagaccgtcgtctggctcaccccggactgcccggcgggcgagaggatccgcacgtctgatcatgccgtgacgaccatgcttgacatctcgaagccatggcagcgctggaccacccgatgcgcaattcctctcagacacgggaagtggttcctcatcgagcctgatcatgacctcactgattcccccgaaatcctcatgcgctctgttcacggggtcctgctcgtcggctgtgtcggacgagcccactccggatccgcttcctggcgctttgccatcacgtcagaactccccacctccaacccaagaagaaacgactacacctcagccgcctgaacccaaccagttggaacacccactacagaagaaatggagcaccaccatgtccatcactgagcagtacaagacccttcgcacctcggtcggcctccacacgcctaccggtcccctggtccgtatcaccggtgatgatcgtctcgagtttctcgacaccttcctgtcccgcgcctcggacttcgtggaccccgacaccactcgggagtgcctcgctctcaccgaggacggccttccgctgacgatcttcctccacatcgagcgcgaggaggagtcatggctccttccccgcaccgccatcgatgcggcgaccctcgccacgtacctcggcaacctcgagaccgatggtgacctgtcaatcgagattgctccagagggttggggagctgtcgctgtcgaggggccgctgtcgtggcagatcgccgaaaaccttctcgacttcgacgtggctggcctcgttcttcacgccgtcacggacgtcgtcgttcccggggcccccgagggatcgaaggcatggctcgcccgggtcggaaccactggagagtacggctacctgctcgtctccaacgttcccgacctcgcccgcacttatctcctcagccgcgccacggagctgggcggtcaggcagtcgacgccgatgctctcgcacgagtccaggccgaggccgggatgccctattacgcgatgggcgtgtgccacctcgatgtcgccgggggtgacctcgcctggctcgtggactggcagcgcatcggcgagttccaaggatccgagaatctgcccacacccgtccgagaccagcgccgactggccgccatcgccctgcccaccggcaaccgcccggaagctggtcagaccgtcgctgccggggatgaggagattggaatggtggtgtacgtcaccccgtccgccaatcccgatgaggaactcgcgttcgcacttctggatgctcctttctggactcccacccttccgttgaccgtcggtgcccacgacgggaccacggtcaccctgccccgcgtcgtggcagcctccagcctcaacaagctggggtgacagcgatgacgatcactgctgagaacgccaccacccgcagcgacattgcccggagcattgcggtgaccggcgtgggactggtcacggcacagggtgaccataccgacgagtgctggaccgaacttgtcgatggggtttgcggaatcaccatgaacgtcacgttcgatgactctggcaccacgattccgtgtgctggcgtggctcccattccgaactctgattcgatcgaccgctgttacctgctcggcgtccatgccatgcgtgaagctctcgagatgagtggcatcgacctggactccgtgggtcgtgatcgcatcggactcgtggtgggctcaagcctcggcgcgatgcccaccttggaggcggctcatcgccgggccattgagaccggcgtgctcgatgccggattggcggcagactcccagctccactgcgtcgccgaccacctcgccgctgagttcgacatccgtggaccccgcgtcgtgacatcgaatgcgtgtgccgctggtgccgtggcgatcggctacgccgcagaactcctctggtccgacgatgtggacctggtcgtctgtggcggtgtcgatccactggcccagatctctgccaatgggttcacgtgcctgggagctctcgacaatctcccatgcagcccgatggccggttcctccggtctgactctgggcgagggagccgggttcatggtcctcgagagaacagatgcggcggctgccagaggccaggaggtgatggccgaaatcgccggctacggcacaagttgtgatggttaccaccagactgccccggacccgggtggcaatggcgcccgcagctcaatggaggccgccctgcgctcagctcatctcaagccgtccgacgtcagctacgtcaatctccacggcaccggtactccgaccaacgacgccgtcgagccgaaggcactccggtcattgttcaagtccgatgaccttccccctgtcagttcggtgaagggcgccatcggtcacactctcggcgctgctggcgccatcgaggccgtgtgctcgatcaaggccatccacgagggggtcctgccgccaaccgtcaacaaccgcgggcaggcttcccgaactggtctcgacatcgtgccggagtgcgcacgcaaggccgctcccgacgtggtcatctccaactccttcgccttcgggggcaacaacgcatcagtggtcatcaccgcacctcgaggaggcgttcactgtaccgccccggcgcagcttcgcgaggtcggaatctcaggaatggcagctctggcgggaaaggccgccaactcggaggagcttctttcggccctgtcagaagattgtccaatctggatggccgatgagaagacctgggaaggggatgctgtccaaaccggccatgtggacatcaagcgcctgtcccgcacaatcaacccgtccaaggttcgtcggatggaccccttgggaatcatctccagcgcggtggtgactgatctgtatgcccgacacgggaagctgagccgcaaggatgccgaaagcacgggaatcatcttcgcaaccggctacggtcctgtgacggcggtgacgcagttcaatgacgggatcatccgccacggttccgagggtgccaacgccctggtgttcccgaacaccgtggtcaacgcagccgcaggccacctcgcgatgctgaatcgctaccgtggttacacggccaccttggcatgcggtggaaccagttcactcatggcgctgcttctcgctgctcgcgtcgttggccgcggcgctgcggatcgcatcatggtcgttatcgctgacgagtttcccagcattgccgtccaggccgtcgcgaagcttcctggctaccgacacagggttgatggttccggagccgtgctctcggaaggcgcggtatgcgtcctggtggaggccgtcgaagtcgccgaagcacgcggtaccgcccccatggcgctgctacgcggcttcggatcccgtggagagtccgtgggagtcggtcacaccgcatccgatggacgggcttgggccaaggccatggccgctgcactgggcccggccggcctgactgcctccgacgtgtcgaccgtcgtggcggcatcaagcggacatcctcgcgtcgaccgagccgagcaggcggccaggcggatcgtcggactgtccgcaaccgctacgaccttcccaaaggcgattgtcggagaaacacacggatcggctgccgggatcgggctgttcggtgccctgtgcggttcgaggtcagccgcgcaccagaacatccttgtcaacgccttttcccacggcggtggttatgcctcgatggtggtggagtcactgtgaccacgacgcttctgccacgggttgcccagccgggaccgggcgtcagccatgtcgacaccgaccgtcccatcgagtgcatcatcacccaccacccccacatgccgcgtgatcgcggaggccacgccacctccgtgtcaggcaggtacttgctgcgccaagccgcagaactcatgctcggcacggatcctgcgcattgccccgtcgtcgacccttcgcggcgctggtactggcccggaatcaatcttcacggttctgtctcccatgtcccgggctggagcctgacgacgctgagcaccggcggccacatcggggcagacatccaggacttccgggagcgtcccggcgcaatggcattcatcggtgacctggtcaagctgtcgcgatcggcgtcactccgagaattcgcggagtgcgaggccgtcgtcaaggtgtccgaattgactaaggagacgttcgggcacgtgcgactgcccgaatggacacccggatggcgccacgttttcgaggactactgggtctggagtctcgagatgcacgggatgggagtcatcgcactcgcatccgatctcccccgagccattcgctggtggcggtgcgacgccgatgcccgtggccgtctccaggctctccgacccataagcagtcttggaccaggaaggccgtcatgagccggtactcacgtcgaatctcaggcatcgaacgcggctatctcaacgccgcaacccggggcccgcaccccaccatccacacgatgatcgacttcgagggccgcgtccccgccgactgttggcggcacgcatccacgattgcgtcggccgccaaccctggcatgacagtggtccggaggtcgggccgatggacatccgatccagcgggctgtccggttgtgttccacgactggaccgcggaccccaacgacgttgccgacttccacgctgacatggatctcgtgacgggaccatcgtccacgctccacgttttcgagggggcggaacgcacccgaatcaccttggcagcaagccatgccgtgaccgatgggcggggcatcgaacgatttctcgtcgacctgcttgcagcgttggacgagcgtgaacccattggaagccccgacaccctgaccgatgtcgatatcaaacgatccttggagaacagcatcaagccccgacgccacctggccgctgtgcccgccgatgtcctttctccactgggggggaggaagaaccaacgtatatgggcctccaggacgtggcacagtgccccgggagccatgagcggaagaatcgctgccgctgtggccgagatgatcgaccacgccgcaatgatcatcatcccggttgacatccggcggcacgtcccagaggtccgatccacagcaaacctaagtgcccaactgccagtgatcatcaccccgaaccagcgctggcaaagcatccatgggcatctgctcacggaccttgctcgccatcgagaccttgcgatcatcagtgaggatttccgccacaacaatccgttcgcatcgaccttggaggaaagccaggccatcggcctcgatggtgtctatccctgtgccgcaatcatctccgaccacgggaagctcgacctttcaaggttccagaccttggaactcaccccggtctcgatgcgaagcctcccgatgctcgttccctactccgcaatgttcatcagcagttgcaccgtcggcgagaccaccactgtcaccatcgctcatcgcgctgatgacgatcccgattccataaacaccttcttccaccacatcgaatcccagatgtccatctgagccacgtcgtccctggagagcaaacatgaccacccaaaatgtcaccaccccgccgcgccccgtcacctcccatgccacggcgaccaggtccgaggctccaccgcgaagcgtcatcagagccatggccatctcgatggtcgcgaccctcatggtcatgctcgacacgaccgtcgtgaacgtgtccttgagcgcgaccaccgcccgcttcgggagcatgggcagcgtgcagtgggtcctcacaagttacctacttgcactgtgcgcgacgatgacggcctccgcctgggtcatcgaccgccttggtccacggctcaccttcatcgcctcaatgaccatgttcctcatcggctcggtgatgtgtgcactgagcgattcagtgtggcaactcgtcactggcaggaccatctccggtgccggagctgggatccttgttccgacagcatccgtcctgcttatccgtggcatcccacgcgaacaacttggcagggtgcaggcactgaatgggagtgtccagttgatcgctcccctgatcggcccgactgtgggcggtctcctcgttgacaggtgcgggggctggccggccatctactgggcgaacgtccccgtagctcttgttcttctgattgaggccgtccgcgtcgatccggacgaaccacacaccgctaagcgccgcctcgatgctctcggcctggtctgtggcagcaccgcgatcgtgctgacagtgcttggtgtctcactcttcggcaggacgtcgcgaaacaccaccttcctgcttacgatcggcgcgcttgcagtcctcgcatgggcgttcttcatcacccacatccgaagggctaccaaccctctgcttgacgtttccctgtatcagaaccctgtctattcatggtccagcttcaacgtagcggtgcttggtttcggtctctacgcccccatggtcgtcatgcccctctatctcgaggcgacgcgccacctcactgccgtccacactggtctggtgatgtcagtggccggcgtcggcgtcattatggccggaatcctgtgcacgaagatcatgggccggatcggtggaggcctcacgatgacagttggcataactctgagcatcatcgccactctgcccctggtccggctgacgaaccacacctcctacatactcctggcagtctgcttggccttgcgtggagcaggaatcagcctgacaatcgtcccagccatgacacgggccttcgagtccatcaagaggacggccatggcggacgcctctgcacagctcaacctgttgcagcgaatcggcgggacaattgcgacagcagtcatcatcgcagttatccaccacgaggccatgctcacccgcggactctcccccacagtgttctcgcacgccaacgtgtggatcctcaccgcgaccgccgtcacccttctgccggccttcgcgcttgcgaaggccgaaagacaacagcaggatctctgagcaccgaggagtactccctcgtagaccctcctctgatctaattgggttcgttccaagtgtgtatctcactccggggagccccgattgctgaaccacatcccgttcaccctggcgagtccctcgtggtacgacgtcccctgggcgcccggatctccgtatctcacaggagatatctcggtcctgccagcggactcgccaaggtggacgacgaccatccggggtccttggcaaatccacatgccacctcgtccgacccttccagaggtggggtggaaagtgcatgtgtctgccaagccatcggaattggaatcggttgcctcagtcgtagcactgtggtgcgtacgccacagcgtccccttcaaagtacttcgcacccgaggtctcgttcacgcgagtcaagtcaagtatgcggaccgaagtcagagcggcaaggtctgcacctgctaccccgacggcgagagccttgagcacttctgctccggtcttgccgagctgcttcagaacgtcgattcacctccggtgtccggcgagctgcgagtcggatcctcccctctgtggttgcgtcacgggagtttccgagaggcatgggcggtgtcatccacaggagtaccgttcccggtctacccgggaacaacacatcctgatcgtcgaggccccgcgcccgcagaatccgatcacgacacgccgtggatccggaggctccgtcggacgaatcgccccagcacggttcttcccatcgacgatgtcagactcctccaccgatcaaatgctggcggcgtgtatcaggcaacatggagagacggcacatcggtagtcgtcaaggaggcccggcacctgtccggacttgatgcggcgggggtcgacgcccgagtgcggctgcgtcacgagtacgaggccctgagaagactggacccctatcgggccgctccccatcccattgatctcattgagaccgaggacggctcgttcctgatcatggaattccttgacggaatgacagtccaccaggagatgtcgaggttccatcctctgattagtaggcgacctcatcggctatcgatgaccgatttttcacgctggtgccgagaggtcgaagatcgcttgaggaatgtcacgagggtcatggccgggtgcggaatcgttcacggggatcttcatcccgcgaatctgatacatgtcggccatgaggttttggttactgactttgaatcctgctcaatcgacggggtcgccgtctcgtcagggatcgccgctccctggttccagtcggacgacacgattcccgatccggcgacgactgacgatctccacactcttctcgtggatccgacttgcggccccgcgcttgtcccccatccaaatcttcgcgcgctcatcagccaggccgcagtcgaggacatgatgggaaatccgactggtttaccacatgcctggaacctcgaggacatgacaagcgaactcgccaaggggatccgggcatcagccactcccgcacgagccgaccgcctctttccctcagacccctacctgttcgggcatccaggttcagaattcggcctgatgcatggcgccgccggaatcatggctgctcttgccgtgactgggtacggtgttgacgcgaatcacgtgacctggatgaaggaccgcttggccacccgcccgaccctgctgccggggttggccaacggaatcgagggaattgccctgggtctctccctgtgcggtcagaacgacatggctgcatccctgctccaccagtccggaattctcacgatcacaacgaacggatcgactgacctcaccctcggtactggtatggcgggccgagcgtgcgcgctgcagtccctctcacaacgactgtcatcgaaatctctcgcccacgctgcatataccctctgggaacaactcgccgtggctatgcggaacactgatgtggccttgccgaacggcctgttctccggttgggagggaatcgggctctccctgcttgcctctcccctgccggatcgtcatgatctcgcccgccactcactccgactggccctggccacgacaacgattgttgacggtgcgctcttctcaggcgagggacagatccgatggccatatctggggcgtggtcccgcggcatgtggcccgctcgccgccaggcttgatgatgaccagacggccaaggccgtggcacagacctgtcgttgtcccctgactgagtcatccggtctccacaatggccgcgcaggtctcctactcgtcctccgccagctcgtgggagaccaagacgacgccgttcgccgccacctcatgagactgtcgtggtcgatggaccgtcgcgaggaaggcacattgctgctgggtgatcatggcctgcgtttctcatccgatctcgcgacggggtcagccggcgccctcctcgccctgagcagggacccatggcggaacatgacacgaatgctcggaatatgcgatgacacctgtcatggcccactagtgacagtttgatctagcgccgatagttcacaactgaaagactccaaacatcgaggaaaacatgctgagccaaaacgccttggcaggcgtggctcgtttcaccacgatgaacaccaggagacagaatgtccgttgaggccatgcaatccatcgagatggacgaggaaaacagcgccagccagacagtttgcgcttgttacagcttcttctcgtggtcaggatgctgcgtagtctcccaagcggtggaagcatcttgatcgtgtgagacaccgtcgactaccctgtcccccgtggtacgcacacgccccgtcctggacagtcccggaagaccgctcatcgcctccggagtcgtcctggcggtcctgctcatcatcgcggtgatgacgatggtgcttcagcgcgaccccactctcacccccggacgccgcattctcggtatcgtcctgtccacggtccaggccgtcggattcatgtggctgcagacccgcatggttcgtcacggcaagggttcgcgcaacatgcgtgcgacccttggaagggtcggtttctgggccacgtggggactcgtcgcagtgggagtcgtcaatctgtggctgaccaactcgtggaccctcttcggggcctccgtcgccacgcccctccttctcctgccaggggtgtggagtgtggtggccaccctcgtgaccctgatcgtcggtttctccgacctcgtggtcacccacacctcgccactgacctcagccacggtcgtgctggtgaccatcgcggtgtcggtgaacctctacgcattcacgaagctgtcgacggcactcgttgaactccgctcctcccaggaggagatcgcccggctgcgcgtggacgccgagcgtcaccggatatcgcgggacctccacgacatcatcggtcgcaccctggtcgccacgtcgatgcgccagcaggcggccctccacctcgtcgaccgcgacccgcaacgggccaaggaacagctcgacgccgcccatgacgcaatcaccgaggggcagcaccagttgcgttccatcatccaggccgagatgagcaccagcctccccgacgagatcagcgacgccacattcctgtgcgaccgactccacatcgacttccgcatggatgaccgcggcagaccgcacaaacccttcgactcggcggcggcggcggccctgcgcgagggaatcacgaacatgctcaagcacagcgcggcgggctactgccacgtcgccatctccccggacctcctgaccgtcaccaacgacggttgtccgcaatcacctcgcccctccaccacaccgggcaccggaatcgaccatctccggtcccagatcgaggcgctcggtgggtcggtgacgacgtcgcggccctcgcggggcaccttccggctccgctgctccttcccgacccggggggcgtccacgaccacacccgcgaccgaaggaggacgatgacgacgagaatcctcctcgccgaggacatcaaactggtggcagaggccttcgaggcactgctctcggtggaaccggagttcgaggtcgtcgcacgggtggcacgcggcgacgacctggtcacatccgccacccgcctgttccccgacgtgatcctggccgacatcgacatgcccgggatgaccggcatcgaggccacccgaatgcttcgcgacaagggataccgcggcagaatcatcctgctcaccgccctgccgggaagcgggcacctgcacgccgcgatggctgccggagccgacgggtacctgctcaagtcgatcaccgcgccctccctcatcaacgccatccgggcggtgtgcaacggccagtcggccatcgacccgaacgtcgccgcggtcgccatgcgcaagggaccctcgcccctcaacgaccgggaaaccgagattctgcgcctagtcgccgacggttcctccaccgcgcagatcgcctcgcggctgtacctcagcaagggcaccgtcaggaactacctgtcgacggcgatgtcgaagctcgacgccgactcacgcacagcggcggtcacgcgggcacgcgaggagggctggctgtagcaggcgacccgctcagcccaccgcccctcagcccgccgactcctgacgcacggcctcctcgaccgcccggctgagcagggacccggccctgaccatcgacgtctccgggtccggctcgagatcggacaacgcgatgatccggtcgaacgcggaccgtttctcctcgggcaggtcacagcgtccgcacaccgcccagacgggcaccccggcgtcccgggcgatcttgcggatggtgtcgggaagcttgccgagcagggtctgctggtccagccgcccctcccccgtgacgacgagactggaggcggagatccgcgacaccgcgcgggaccatcccaggacgaccgccgcgcccgggcggtacctggtccccaggcacatcagcgcccagccgacccggctgggcggctgcgaaccccctggccaccgcccggcaggcctttcccgaactcagcgaccccttgaaggagtcgacggcaacgatgaccggcgcattcggatcaggacgcatgggatcagcatgtcacgtcgatacggagcagtcgcgccgcctacccctagactcgggggcatggtcaaccgagtctacctgtccctgagcgttctcgccctcgtgctgtgggtggtcgcctaccgtcacatgccgggctgggccgcgggcatcaccctggtgggcatcgtcgtgctgtcgctgtggtgcgagtggtcgcgggtgcgcaccctggccaggatcggcaagtcccgccagcagggcccccgctcctcccgaggacgcaacctgtcgtgagcaatacgattcccgcagccctccaccccggccctgacgaggcc

SEQ ID NO: 429 - DNA, 26620 bp, Propionibacterium acnes
  source 1..26620: mol_type = genomic DNA
ccttgtggacaccacgtcatccacatgacttgtgtcacatgattcccggaccatcatcaagcagatgctcacccaactgtaatgatttctgttctgaatctggacatgctctgacctgcattcaatgatcaattccgtgcgatattccacaacgcacggggaggtcgcagacaatgacaacagaaagcatccccacgcggctgctcgtgtggcacgagcagaccgatccgaccaagctcctcaggatcaccgacgcgatcaggaggggggatccccttccccccatcgaggccatggcgatcggccacagattcctcgtcctcgacggtgcgcaccgggcccaagcccaccagtactgccatcgatctgagatccgagcccgcctccacaacctccccctcagcgcggaaataccaggctggagccactccataccccgcgatgcagcagcgaaactggctcacctactcctccccgtggacgctctcggtcaggcggaaatcgtcctgcacggggtgcgccgtcaggtggggaccgcttcacaacgaccgcgcgacatctttctcgcctgccaccggatcgcgcgagttgcctacgcgcatggaatcagacctctcggcccggagttctccaacgctccgacgatcgacgccgccaccatgacctggcgcccgccgaacgtgggcacgttgtgggccatcgccagcagtctcggacccctgcccgcaactgtgacccggttcgccccgatcctccggcacgacgccatcggggattccgcgatgacacccgtcacctccgccgcgtgacgacccgcgccaattccgccccaccactggatgaggggcagccgcgtggacgatgctcctgttcaggcagggactccatacgagaccaataggaaaatcatgatcaaaaacacaagccctctgaccgtgaaaaatgtctcgaaaacattccgtggctccagcggagaagccatcaaggccgtgcaagacgtgtcattcaccgttgagcgtggtgaggttgtggcattcctcggcccgaacggcgccgggaagtccaccaccatcgacatggctctcggcctcacccgccccgacagcggccagatcgaggtcttcggtactgacccgctcagcgcggcccggtcgggacgctgcaccgcgatgacacagaccggcgggttgctgcccgacctcacgattgggcagaccatggagatcatctcctcgctctatcgtggctcccacatgaatgcctgcatggagcgagcaaggatcacgcatctggccgatcggcaggtgtcgatgtgctcgggaggcgagcgccaacgacttcgcttcgcactggctctgctgcccgatcctgacttcctcatcctcgacgagcccactgcggggatggatgtggaggcgcgccgggacttctgggcagagatccacgaggacacgcgtcgtggtcggacaattctgttcgcaacgcactacctcgacgaggtggacgagttcgccgatcgggtcatcctcatcaaggagggccgcgtcatcgccgacgacacctccgacgcgatccgcaccatgtcggggggttgcaccgttacggcgaccattcccgacttctccctggcacgactgaatctgccgggcacccaactcatcaagcagggcggcgcacgcgttgatctgcaccatcccgattccgatgccctcgcagcgcgagtcatccagctcggcggcaccgacctgcgcgtggtcccccgcagcctcgacgacgccttcctcgctctcacctcaaccaccaaggagtcctgacatgaccgcccaagcgcttcccgcagtcgccactcccaaggcccgccaccgatccgccatctcgctgaagtacttgtggtgcgagatgcgtcgccccttccggcgttcgacgatgctgttcaacctcgccctccccgcagttctgtacctggccctgttccgcaccgtccacaccgccgagctgccggacgggaacttcgcgatgtggatgatgatcggcatcgctgtctacggagcggccactgcgagcaccagctacgcagcctccatctccgtcgacgaggccaacgggtggacccgcaccatccgcctgacgccgttgtcgtcggtcgggtacgtgctggtgaaggtcctctgcgccatggccatcgccctggccccgaccctgctcatcggtctcatcgggctgttgaccggagctcacggcacgctgcgggtctgggtaatcggactgggggcggcttggctcagctcagcaatcttctccgccttcggcctggctctcggactgtccctgcgtcccgaggtcgtcatgcacgtccccggcctggtcatcaccggtctggcgttcctgggcaacgtcttcgtccccctcagcgggacgatgctcaccattggccgctggagccccgcctacggcatcaccgcgctggctcgttacccgctcaccaacggcatcgacatcgggggcggccacgactccctgacggctgccctcatcggcaccttctgctggttcgccggattcgtgttctgggcctcccgtcgatttaccaagagcacgggtcgtcagtgacagattcggccgatctccggaaggagcagtgttatgaccaagcccctcattgcagtggtcaccgcgggccaaggagcgcagaagcctcgcctgctcacgccatggctcaaggtccccggcgtcacggagaagcttgctgcatggtccgctcaggccgatgtggacctcgtcgagctcggtaccagggcgaatgcagaaaccttggcagcgaccgagaatgcgcagccactactggtctgtctcggagtcctcgtctcggatctcctggccgaccagaacattgtgctcgcaggacactccgtgggcgagctgacagcagcgtgtctcgccggggtagttgatcccgggacggccgtcactcttgcacgacggcgtggactggccatggcgcgggcctgcgctctccacccgaccaccatggcggccatcattggtgacaatccggatgacgtcctccggcggctctcggaactgggactcacggctgccaacatcaacggaggcggacagattgttgcggccggctccaccgacgcgatcgcggaactggtggcgacccctcccaacgggaccgcagtcaagccgttgcgagttgctggcgcctttcacaccaagtacatgacgcctgcgcaggacgctttcgcccaagctgctcaagacgtcaccttctccgacccgcagcacccgatcatctccaacctcgacgggcaggagatccggtccggcaatgacctgcgtgaacggctgattgcccaggtgaccgcgccagttcgatgggatctctgcatccagcagatcgcggatcgtcagccggaactcgccctatcggcccctccggggaaggtgcaggcgtcgctcttgtctcggcagatcccggacctcgcgacggtctgcatcaccacaccacgggaggcagcccaggctgcacagcggatcgaccagtccgtatccgtccttcagggggcatgatgctcatccccgagtacttcctcacagcctgttcggaccatgctgagcgcctggcgatcatcacccacaatgacgttgtgacgtgggccgaactggcgactcgcgtcgacggttttcggcgctggctgcgggaccatggcgtgcaccgccaggacagggtcgttctccagacgccaagcaccgtaggcacggtagccctcatgtgggcctgcctgctcgacggcgtgacgatggtcccggtgcaccaggacctcactgcctcccaggtgcagcaagtcatcgacgactgccgtccagctctggtgtgtggcagcccggacctcgtccaactcctcaactcccccggaatgaagacaagcacacctccaacgcggccggagtcaacgagtattctgccgtccttgtcccgggtcagccccgatgaccttgcgatgctcatctatacgtccggcacgacgggtctcccgaaggggatcatgtgtccccaccggcaggtcgccaccgccgcacggatcgtccatgactgtctcgggtaccgcacggacgacgtcattctctgtcgcctgccgttgtccttcgactacgggctctatcagattctgatgtctgccatctccggtagcgcggttgtcctgcgggacggaggcgcgcaggaccgcaacctggtgcgcgacatcgcccgtcacggcgtcactgtcgttccagtcgtgccgtccatggcgtcaatgctcatcaccctgcagcgtcgtgatcagttgccgaccatcgtcagactgttcacgaataccggggcgcgtctggcacccgagaccgcgaaccagttgctcgcaagcttccccggctcccgctatgcgtcgatgtatggcatgacggagtgcaagcgcatctccatccttccggtggaggagtacgagacgcatccggacagcgtgggaagagctctgcccagcactcacgtcgagatcgttgacgctcagggagttccggttccggcgggcgagcacggggagatcacggtgtccggcccgaccgtgatgaacggctactggcaggtgccgaacagtcccagtggacgattccgacccagcggccacggcctcactctgttcaccggtgatcgcggctggatggatgaggagggacgtctctacctcctcgggcgcgacgacgagatcgtcaagcatcacggcatccgaatcagcctgcaggagatcgagatagccgccgaagccgcgccgggcgtcgacgcagtcatcgctctcaagccggcctccgactcggcccccattgaaatcgcctactgcggcagcacgagtcccgagaacctggcccgccatctcgaaaccgtcctggaccgggcgcgacgaccccaattcatccaccaactccagcagatccccctgacccgtaacgggaaaccaaaccggtcagcagccgccgaggccatccgctcaagggcgtgacggcgaaggccaacacccacagacgaaaggaaaccaccatgacccaggccgagttcaaccagttcatcgagtccacctgctccgcgacgatcgtggatcccgaccgtcctttggtcgatcagggcatcgactccctcggaatgctcaccctcatggtcgctatcgaggacagcctcggcatcgaactggatcccgagtccctcgccgacggtaggggttccacgccctccggtcttctgtcccttgtcgagcagccgaaagcgacggtgtgacgacatgacgacgatggttccttgccgccgtgtggagatgccgcaactgttcgaccacatccccggaagcatctctctctcaggagggctgcccgatctgagcgtgctcccgagcaatcagatcgccgaactgacgtcccggatcatgcgtctcggctcaagaatcctcctgcaatactccaccccttcggtctcgtcctccttggtgccggccatcctggacctggcggaacgaacatgcatgtcaccggatccgcggaatctgatcccgaccgcgggttcccaactgggcctggccatggtgatcaatgcctttgacggcgatgagatcatctgtgactgcgccacctatcccggggcgctggccgccttcgcctctgccggcgtggaaacaacgggggtggccagtgacgaggaggggctcaacccagacgcgctcgctcacgccgtcgcagagggtcgggccaatggccgccgcatcgcagccgtctacaccacgcccaccttccagaatcccaccggctccgtacagtccgagaaccgccgtgcggccctgctcaaggtgtgtgctgacaatgacctcctcctcatcgaggacgatccgtacggcatgctgtccttcgacgggcagacgtggccagctctgaagtccatggacccacagcgcgtcatctacctgggcaccttctcgaaggtgttcgcaccgggcgtccgttccggctggatcgatccgcccgccaatcttgtcgagaaactccgcgctgtgtgcgagatcatgacactctcgccatcagccctcaaccaagcgatcatcggcgagtaccaccgtcgtcacggatgggacgaactgttggagggctatcgcgcctcctaccgcgaccgagcccgtctcctcatcggggctctcgaggctgaactggcaagaacgaattgcactggcacgtggacctggcgtgaaccacggggcggcttctacctgtggttggagaacgtcgccagcaccagcggtatcgacgttgcgcgtcgcgccgccgacaacggagtggccgtggtgcccgggaaacacttcgacgcagccggacacgattcgccgagcctgcgggtgtcgttcagcaattcacgcccggctgatctggtcgaaggagctcgtcgtctcgcccgtgcactggtgggagaggacgttcagaaatgactctcgcgacacgcaccgccaccgacaccctgcagcagaccttgccctggggcacccacgaacgtctcgtcttcgggcgggcgctcctgcgcagcaccggcttcccagccgaaggcttggccctgctcgactccgacgacatcctccccctcctcgactcctttcttgccggggacatcgacagaactcacttcgagaaggaatacaccagtcgcgaggagtccggcgcaagggcgctcatcaacgtcttgaaggacgatgcagtatcgcgcgccatcgcatggcagaaccccaccgcgtggaggtccttcgaatccctgtcgtccacgagcggaatcaatgcttcgactcggcgcaaggtacgccaactcgccctctactggcaacgttactgttccaaggctgagaccattggatacttcggcccgttcgcctgggccgaagtcgacccggaggcctctgcggtcgaattcatctcctccgaccatctgatcgaccgttcccacgtcgcaatggaggcgtgggcggtcattgagatcgggaaagccctggcatcacgggccgaccttcagtggtggatgccaccaatcctgtcccccgccgtcgacctcaacatggagagaggcaccgtgacggtggctggacaccagccacgacgggtccgggaggacgaggcacgagttctcttcctgaccgacggcacccgtcccgccgcccagatcgccaagagcctcgacatggagcccgagcggttgcgcaggatcctcgtggcccatgaacgtcgtcacaccgtgatctgggacgccaacatccctgtctcagtgcacgcgtgggacatcctgcacgaacgcattgcccagatcggagacgctgggctgcgagatgaggccactgctgttctcacgaggttcgacgagcttctggaggtcatccgcaacattcccgacgcccggtccccgacggaggcgacggaatccctgtcccgtcttttcgaaaccgtgacaggaacctcttcgaacagacgtgcgggccaggcatatgcagcccgcagcctgtgctacctggactgcacccgcgccggaaccgccaaggttgggacccggcttctcgaagccctcgacgcccccctcaacctcgtcctacaatccgctgactggttcgcggcgaccttggcaaaggaatacaccaccgaaatcacggacctcgcaaatcgaaagcagcgggcctcccaccagccactgaccatggctgatgtctggccgtccacgatgtcgctgttctggggggactcaccgcccccactgcagcgagccgtgaccgaactgtcacggcggtggagcagagtcctcgaggggctgcagccagtcgacggtcgcatcgacacgacatcgtccgctctctcgggcgccgtggacgagcagttccccgtgtgcaccccgattccagaactgtcagtgcacagcccggacctccaggtcatcacctcgagcactagcaacatcgcctccggacgagtcactgcagtcatgggtgagctacatgcctgtctgagcagtctcgacatgccgttgctcgagtggtcgctgccccatggttccattcgcgatcgcatcaacaccgcgctcaacctgcgacgtctggttcccttgttccccgagacatggaggcgcaacaccggccgcatggttccagcgacggtcggagtgggggatcgcgcaatcgggttcactcggacggccgatcaagaccgtgcgaacacatggtcgatgtcggcactgctgttcgagcagaccgaggacggactcatgatccgtgatcccgatggcaggctctggaccatcgcacaagcgtggagcgtgcccatctccatggtcgccgccgatgcgttcaagatcgggctgcccggctcaccagcccctcggctcaccattgacaatctcgtcgtgttccgtcgtacctggaggtttcccgctggctccatcgacatcatgcacggttcagccgccgagaaacacgctcggctgagggagtggcaggtcacgaatcaccttcctgaccacctcttcgtcaagttcccctccgaacccaagccgatctacttctccttcgagtcccccgccatggccacggtcttcacgcgatcactgcagcgcgacgcccgagagaatccagacagtctcgtgacgatgtccgaagcactgcccgagcctcaatcctcatggctgcacgacacccggagccaccactacgtccacgaattccggctgcaactgaccaaggagcgacatgacgaccacagttgagacacatcccgaaacacgtggcacaaccgcgacatccatctccaatctgatcggtcacacccctctcgtaagaatggaccatctgttcgacggcctccccttcgaggtgtacggcaagctcgagaagctcaatcctggcggaagcatcaaggatcgagcagcacaatccatgatcgaacgggcaattcgacggggtgagatcgtcccgggccgtacgaccgtcatcgagtccagttcgggaaatctcggcatcgccgtggcgatactgtgccaggagcacggcctgaatttcatctgcgtaaccgatgccaaggccacgccaacgaacattcgactcatcgaagcgttcggggccactgttgaggtgatcgaagaacctcatcccgagagtggcgaattcctccccatgaggctcaagagggtaagagaactgctgtcagagattccagatgcatggtggccgaatcagtacgggaaccccgacaatccggcggctcacgagcggactgtccgcgagatcatcgaggcaatcccgcgggttgacacgattgtctgcgcgaccggctcgtgcggaacccttcgcggctgccacgaagcattgcgaaagctgtccccacgcacccgactcgtcgccgtggacgccaagggcagcgccatcttcgacgaggcaggagcaccccatccccgctgtgtcccgggacacggtgcgtcagtgcgaccgccgctgtggcgcgcggggctcgccgaccaactggttctggtctccgacgcggactgcgtcgtgggatgccaggaggccctgcgcaccgaggctcttctcctcggcggatcctcgggagcaattctgacggccattcaccgagtgtctcccacgattcccgctggttccaccgtggtgacgatcctccccgacggcggcgagcgctacatcgacaccatctacagccgctcgtgggtcgactcacacatccccgggctgccctctctcgccgactggggggctcccaaccccgccaattcgtatgacctgaacagaagtgcctcatgaagctctacaccagagagaccgtcgaaactgcgcttgtcgggcgtcatggccaggttctcagtgccgtacagagtgcatacatgctgcattcgacgggagagacatcgctgccattctcaaccttcctccgcccggccgggtatccgaacgatcggatcatcgcacttcccgcccacatcggaggcgacttcgacatagccggtatcaagtggatctcatccttcccggaaaacctcgaccggggccagcaacgagcttcctccgtactcatcctcaatagtctggagacgggatacccgaccgccctgctggagtccagtcagatttcagcaacgcgaacggcagcatcagccgccctggccagcgccaccctccatggctccgaagaccatgtcagcacgattggcatcatcggctgcggaacaatcaatcttgcaacgatcgactacctcttccacgtgcacccccagatcaacgaggtcctctccttcgatctgaggcgggagcgggcccatgagttctcgcacctcgtcaaggcttcgcacccagaggcccgggtccgtgtcgccaaggagcccgacgagattctggccgcaagcaacaccatcgcgatcgccacgaccgactcgagtcattggttggaccttccgccgtggcacgggccggggcaccaagtcgtcctgcacacgtcgctgcgagacctgtcagtgccctcgatcctggcagcggccaacgtcgttgacgatcctgatcacgtctgccgtgaagcgacgtccttggatctggcaactcagcagaccggcaaccgggacttcatcacggggagaatcggagacctccttcttggcgcgccgctgtcctcaagtcctgactcccgtgtcattttctcacccttcgggctcggcatcctcgacctcgcagtcgcctccgtcgtcattgctgccgcctcctcttcagcagtcgagatcaatgggttcgaccccgggaaacacgccacaagcatgattgaggtgaatcgatgaccaccacacagatcaacgacaacacggccgttctgcgcgacgtattccccgccggctccgtcgcattcgtgagcggtgcctcacgcggaattggcgctgcctgcgcgacagcccttgcggccgcgggatgcaacctcgccatcacttatcgaaggaaggagaacgaggcggcacaaatcgccgaatccattgaagccatcgggcgccagtgcatcacaatgcagatggacgtaaccgatgagaaccaagtgaccagagccttccgcatcattcgccagcattacggacgcctggacgccgcggtcttgaactcgggaatcaccagtgacgggcatcttgcaacaatgagccgctccaagtggagctcggtgatcgacacgaatctgaccggaaccttcctctgcacgcgcgaggcgaccaaggccatgtactcgtccggtggctcgatcgtcatggtcgcgtccaccagtggagttgcagggcgaccgggccaggccaactacgcagccagcaagggcggaatcgttgccatgatgaagacgctggccccggaggttgcggcaaagaacgtccgggtgaatgcggtggcacccggcttcattcagaccgacatggtggcggccgttccaaaagcggcactcgcccaggcaatccaacacatccccatgggccgtcttggcctggcacaggaggttgcgtcagccgttaccttcctggcctccccgctcgccgcctacatcacagggaagaccctcactatcgatggcggaatgatcaacggctgaccccaggacccgcacacccccagtaccgagaaagaaacaacaatgaccgagatcacccacactgccaacagcatccgaacccgcgccgaggaacgttccaacaaagcttggcgcctgaaggaggagatcatctccaagctcggtctcgagaccaagccagaatatgtctcggacaaccaaccgctcttcggacgtggccttgagatggattcccttgacactctcgaagtcgtcgtcgccgtcaacaatgagttcggagtctcggtcaacgacgacgacgtacaggcgttcggctcgatcaatgccatggtcgatttcatcgaggtgaacgagaagtgagttctcttgcgctcgaggcgccacccaaggacgcccgtaagaaattcgcctacgacagcgatgccatcaagacgatgctcccacatcgttggccgatgctcatgattgatcgcgcctacgacgtcgtcccagggaaatcgggcaaaggcatcaagtcggtcagcgtcaatgagccgttcttcgccggtcactaccctgaccattccatcatgcccggcgtcatgatcgtcgagtcgatggctcaactcgtggccgtcatctacgtagccgaggccattcagaacaatcccggcatgacgtcgcacgacgcacgttcaagcgttggttatctcggcgcgatccgtcagatgaagttccgacgcctcgtcactccgggcgaccaactcaccctccacgcccagctcggcgagaaagtgggggctctgcgcgaggtttccgtgagagcactcaatggccgggatgtcgtcgcccagggggaactcgtcgtcaccgagcggtgacacccagccacacacgagaaggaagtcccatgatcgttcgcccctacaggccacgtgatgcggaagcgatcgtacatctctacaacagccattccgactcccccaatccagtgtcgggagggattgttgaggaggagttccagagggagctcgaagaacgtggttcgacagtgttcctagtggccgaggaggccggatccattgtcggcacattcgggatgttccgcacgaatggccgacacaccatggccgatgatgaagtcttcgccgacatgttctatgtcaccccgtcacatcgactctcgacagttccgggacagctaatcactgaagccatcagcgagtgcttcatccagggcatcaacgtgatccgcctcaccgtgaaccccgcgaacatctccgcgctcaaggtttacagaaaagtcggttgtgcctgtctcggggccaccgatgcaggcgaggacgggaacattgagctgtacaacttcatccctctggttcttagggcaaccatcaccaaactcgaccacgattgtattcgagccctggcggacatgacttcgttcgcctgcatcaccgagggacgtccacttgatctgtcccacgacttcatcgtggacgctggacggaagatcgtctcccacagcatccagatcgggcgttcaaccatccacgccatggtcgacacgggctcgaggaccattgtggaggccaccctcgacaaccgcgactgggatgctcctcgccagatcgtcgcccccaccccctgtcagaaccggcccgaggaacagcgaggcaaccctgtccggctggtgcacaagaagcttgaggtcaccttcaacgaaggagtcattgagatcagtacgactggccactggggcccggtcctcgcaatgtcctggccctcctccgtctcgcaccgcgctcacgggtggcgacagggccccgccaagtcgtatcgatgcgagcttctcgagaattgcctcgtcctggatgacgaaggaggagtgaaatgcaccatcagcctcaatgattgccaagtcgcgatccggatggatggtgccccaaaaacggaattgagaatgtaccagtggtgcagcctgcgccagggctatctgacggctgacaccggcatcacgagcttcaaccgggcatccagtgggctcggagtcgccgtccgggactcgtccgagattgtcgccgcgggccttcccgtcatccctgacacaccgatcacatggagtgagggtgacatcacggttcagctcgatccctgcggccgcgcctccctgatccactcgaccctggtggaccgaagaatccacttggacgagtctggctcggcaagtctcaccatgaccgtgtttggtgattcccagccccatcgtgccgacaccgtcgagctgcctcccctcgcggcaggcaccgacaggatcgtcctcaagccggctgccggaggcgtgaccacatggcgcttgggcgccaccaaggtgctcaagtcaccgtggccacacgcccgcgcgctcgggcccaatccgatctggcgagccggcctgtgggtcagtcacgagccggatcgccacgaccgtcgccaaggaatggggtggggtcccgatcatcgcagttggaccctgtcggaagacaccatgaccagtactgacgggacactctcctggcgcttcagcggctcccccgacaccggctggacggtcgacgtcacgacgagcaacacgcacggggagaccgtcgtctggctcaccccggactgcccggcgggcgagaggatccgcacgtctgatcatgccgtgacgaccatgcttgacatctcgaagccatggcagcgctggaccacccgatgcgcaattcctctcagacacgggaagtggttcctcatcgagcctgatcatgacctcactgattcccccgaaatcctcatgcgctctgttcacggggtcctgctcgtcggctgtgtcggacgagcccactccggatccgcttcctggcgctttgccatcacgtcagaactccccacctccaacccaagaagaaacgactacacctcagccgcctgaacccaaccagttggaacacccactacagaagaaatggagcaccaccatgtccatcactgagcagtacaagacccttcgcacctcggtcggcctccacacgcctaccggtcccctggtccgtatcaccggtgatgatcgtctcgagtttctcgacaccttcctgtcccgcgcctcggacttcgtggaccccgacaccactcgggagtgcctcgctctcaccgaggacggccttccgctgacgatcttcctccacatcgagcgcgaggaggagtcatggctccttccccgcaccgccatcgatgcggcgaccctcgccacgtacctcggcaacctcgagaccgatggtgacctgtcaatcgagattgctccagagggttggggagctgtcgctgtcgaggggccgctgtcgtggcagatcgccgaaaaccttctcgacttcgacgtggctggcctcgttcttcacgccgtcacggacgtcgtcgttcccggggcccccgagggatcgaaggcatggctcgcccgggtcggaaccactggagagtacggctacctgctcgtctccaacgttcccgacctcgcccgcacttatctcctcagccgcgccacggagctgggcggtcaggcagtcgacgccgatgctctcgcacgagtccaggccgaggccgggatgccctattacgcgatgggcgtgtgccacctcgatgtcgccgggggtgacctcgcctggctcgtggactggcagcgcatcggcgagttccaaggatccgagaatctgcccacacccgtccgagaccagcgccgactggccgccatcgccctgcccaccggcaaccgcccggaagctggtcagaccgtcgctgccggggatgaggagattggaatggtggtgtacgtcaccccgtccgccaatcccgatgaggaactcgcgttcgcacttctggatgctcctttctggactcccacccttccgttgaccgtcggtgcccacgacgggaccacggtcaccctgccccgcgtcgtggcagcctccagcctcaacaagctggggtgacagcgatgacgatcactgctgagaacgccaccacccgcagcgacattgcccggagcattgcggtgaccggcgtgggactggtcacggcacagggtgaccataccgacgagtgctggaccgaacttgtcgatggggtttgcggaatcaccatgaacgtcacgttcgatgactctggcaccacgattccgtgtgctggcgtggctcccattccgaactctgattcgatcgaccgctgttacctgctcggcgtccatgccatgcgtgaagctctcgagatgagtggcatcgacctggactccgtgggtcgtgatcgcatcggactcgtggtgggctcaagcctcggcgcgatgcccaccttggaggcggctcatcgccgggccattgagaccggcgtgctcgatgccggattggcggcagactcccagctccactgcgtcgccgaccacctcgccgctgagttcgacatccgtggaccccgcgtcgtgacatcgaatgcgtgtgccgctggtgccgtggcgatcggctacgccgcagaactcctctggtccgacgatgtggacctggtcgtctgtggcggtgtcgatccactggcccagatctctgccaatgggttcacgtgcctgggagctctcgacaatctcccatgcagcccgatggccggttcctccggtctgactctgggcgagggagccgggttcatggtcctcgagagaacagatgcggcggctgccagaggccaggaggtgatggccgaaatcgccggctacggcacaagttgtgatggttaccaccagactgccccggacccgggtggcaatggcgcccgcagctcaatggaggccgccctgcgctcagctcatctcaagccgtccgacgtcagctacgtcaatctccacggcaccggtactccgaccaacgacgccgtcgagccgaaggcactccggtcattgttcaagtccgatgaccttccccctgtcagttcggtgaagggcgccatcggtcacactctcggcgctgctggcgccatcgaggccgtgtgctcgatcaaggccatccacgagggggtcctgccgccaaccgtcaacaaccgcgggcaggcttcccgaactggtctcgacatcgtgccggagtgcgcacgcaaggccgctcccgacgtggtcatctccaactccttcgccttcgggggcaacaacgcatcagtggtcatcaccgcacctcgaggaggcgttcactgtaccgccccggcgcagcttcgcgaggtcggaatctcaggaatggcagctctggcgggaaaggccgccaactcggaggagcttctttcggccctgtcagaagattgtccaatctggatggccgatgagaagacctgggaaggggatgctgtccaaaccggccatgtggacatcaagcgcctgtcccgcacaatcaaaacgaaaaaggttcgtcggatggaccccttgggaatcatctccagcgcggtggtgactgatctgtatgcccgacacgggaagctgagccgcaaggatgccgaaagcacgggaatcatcttcgcaaccggctacggtcctgtgacggcggtgacgcagttcaatgacgggatcatccgccacggttccgagggtgccaacgccctggtgttcccgaacaccgtggtcaacgcagccgcaggccacctcgcgatgctgaatcgctaccgtggttacacggccaccttggcatgcggtggaaccagttcactcatggcgctgcttctcgctgctcgcgtcgttggccgcggcgctgcggatcgcatcatggtcgttatcgctgacgagtttcccagcattgccgtccaggccgtcgcgaagcttcctggctaccgacacagggttgatggttccggagccgtgctctcggaaggcgcggtatgcgtcctggtggaggccgtcgaagtcgccgaagcacgcggtaccgcccccatggcgctgctacgcggcttcggatcccgtggagagtccgtgggagtcggtcacaccgcatccgatggacgggcttgggccaaggccatggccgctgcactgggcccggccggcctgactgcctccgacgtgtcgaccgtcgtggcggcatcaagcggacatcctcgcgtcgaccgagccgagcaggcggccaggcggatcgtcggactgtccgcaaccgctacgaccttcccaaaggcgattgtcggagaaacacacggatcggctgccgggatcgggctgttcggtgccctgtgcggttcgaggtcagccgcgcaccagaacatccttgtcaacgccttttcccacggcggtggttatgcctcgatggtggtggagtcactgtgaccacgacgcttctgccacgggttgcccagccgggaccgggcgtcagccatgtcgacaccgaccgtcccatcgagtgcatcatcacccaccacccccacatgccgcgtgatcgcggaggccacgccacctccgtgtcaggcaggtacttgctgcgccaagccgcagaactcatgctcggcacggatcctgcgcattgccccgtcgtcgacccttcgcggcgctggtactggcccggaatcaatcttcacggttctgtctcccatgtcccgggctggagcctgacgacgctgagcaccggcggccacatcggggcagacatccaggacttccgggagcgtcccggcgcaatggcattcatcggtgacctggtcaagctgtcgcgatcggcgtcactccgagaattcgcggagtgcgaggccgtcgtcaaggtgtccgaattgactaaggagacgttcgggcacgtgcgactgcccgaatggacacccggatggcgccacgttttcgaggactactgggtctggagtctcgagatgcacgggatgggagtcatcgcactcgcatccgatctcccccgagccattcgctggtggcggtgcgacgccgatgcccgtggccgtctccaggctctccgacccataagcagtcttggaccaggaaggccgtcatgagccggtactcacgtcgaatctcaggcatcgaacgcggctatctcaacgccgcaacccggggcccgcaccccaccatccacacgatgatcgacttcgagggccgcgtccccgccgactgttggcggcacgcatccacgattgcgtcggccgccaaccctggcatgacagtggtccggaggtcgggccgatggacatccgatccagcgggctgtccggttgtgttccacgactggaccgcggaccccaacgacgttgccgacttccacgctgacatggatctcgtgacgggaccatcgtccacgctccacgttttcgagggggcggaacgcacccgaatcaccttggcagcaagccatgccgtgaccgatgggcggggcatcgaacgatttctcgtcgacctgcttgcagcgttggacgagcgtgaacccattggaagccccgacaccctgaccgatgtcgatatcaaacgatccttggagaacagcatcaagccccgacgccacctggccgctgtgcccgccgatgtcctttctccactgggggggaggaagaaccaacgtatatgggcctccaggacgtggcacagtgccccgggagccatgagcggaagaatcgctgccgctgtggccgagatgatcgaccacgccgcaatgatcatcatcccggttgacatccggcggcacgtcccagaggtccgatccacagcaaacctaagtgcccaactgccagtgatcatcaccccgaaccagcgctggcaaagcatccatgggcatctgctcacggaccttgctcgccatcgagaccttgcgatcatcagtgaggatttccgccacaacaatccgttcgcatcgaccttggaggaaagccaggccatcggcctcgatggtgtctatccctgtgccgcaatcatctccgaccacgggaagctcgacctttcaaggttccagaccttggaactcaccccggtctcgatgcgaagcctcccgatgctcgttccctactccgcaatgttcatcagcagttgcaccgtcggcgagaccaccactgtcaccatcgctcatcgcgctgatgacgatcccgattccataaacaccttcttccaccacatcgaatcccagatgtccatctgagccacgtcgtccctggagagcaaacatgaccacccaaaatgtcatcaccccgccgcgccccgtcacctcccatgccacggcgaccaggtccgaggctccaccgcgaagcgtcatcagagccatggccatctcgatggtcgcgaccctcatggtcatgctcgacacgaccgtcgtgaacgtgtccttgagcgcgaccaccgcccgcttcgggagcatgggcagcgtgcagtgggtcctcacaagttacctacttgcactgtgcgcgacgatgacggcctccgcctgggtcatcgaccgccttggtccacggctcaccttcatcgcctcaatgaccatgttcctcatcggctcggtgatgtgtgcactgagcgattcagtgtggcaactcgtcactggcaggaccatctccggtgccggagctgggatccttgttccgacagcatccgtcctgcttatccgtggcatcccacgcgaacaacttggcagggtgcaggcactgaatgggagtgtccagttgatcgctcccctgatcggcccgactgtgggcggtctcctcgttgacaggtgcgggggctggccggccatctactgggcgaacgtccccgtagctcttgttcttctgattgaggccgtccgcgtcgatccggacgaaccacacaccgctaagcgccgcctcgatgctctcggcctggtctgtggcagcaccgcgatcgtgctgacagtgcttggtgtctcactcttcggcaggacgtcgcgaaacaccaccttcctgcttacgatcggcgcgcttgcagtcctcgcatgggcgttcttcatcacccacatccgaagggctaccaaccctctgcttgacgtttccctgtatcagaaccctgtctattcatggtccagcttcaacgtagcggtgcttggtttcggtctctacgcccccatggtcgtcatgcccctctatctcgaggcgacgcgccacctcactgccgtccacactggtctggtgatgtcagtggccggcgtcggcgtcattatggccggaatcctgtgcacgaagatcatgggccggatcggtggaggcctcacgatgacagttggcataactctgagcatcatcgccactctgcccctggtccggctgacgaaccacacctcctacatactcctggcagtctgcttggccttgcgtggagcaggaatcagcctgacaatcgtcccagccatgacacgggccttcgagtccatcaagaggacggccatggcggacgcctctgcacagctcaacctgttgcagcgaatcggcgggacaattgcgacagcagtcatcatcgcagttatccaccacgaggccatgctcacccgcggactctcccccacagtgttctcgcacgccaacgtgtggatcctcaccgcgaccgccgtcacccttctgccggccttcgcgcttgcgaaggccgaaagacaacagcaggatctctgagcaccgaggagtactccctcgtagaccctcctctgatctaattgggttcgttccaagtgtgtatctcactccggggagccccgattgctgaaccacatcccgttcaccctggcgagtccctcgtggtacgacgtcccctgggcgcccggatctccgtatctcacaggagatatctcggtcctgccagcggactcgccaaggtggacgacgaccatccggggtccttggcaaatccacatgccacctcgtccgacccttccagaggtggggtggaaagtgcatgtgtctgccaagccatcggaattggaatcggttgcctcagtcgtagcactgtggtgcgtacgccacagcgtccccttcaaagtacttcgcacccgaggtctcgttcacgcgagtcaagtcaagtatgcggaccgaagtcagagcggcaaggtctgcacctgctaccccgacggcgagagccttgagcacttctgctccggtcttgccgagctgcttcagaacgtcgattcacctccggtgtccggcgagctgcgagtcggatcctcccctctgtggttgcgtcacgggagtttccgagaggcatgggcggtgtcatccacaggagtaccgttcccggtctacccgggaacaacacatcctgatcgtcgaggccccgcgcccgcagaatccgatcacgacacgccgtggatccggaggctccgtcggacgaatcgccccagcacggttcttcccatcgacgatgtcagactcctccaccgatcaaatgctggcggcgtgtatcaggcaacatggagagacggcacatcggtagtcgtcaaggaggcccggcacctgtccggacttgatgcggcgggtgtcgacgcccgagtgcggctgcgtcacgagtacgaggccctgagaagactggacccctatcgggccgctccccatcccattgatctcattgagaccgaggacggctcgttcctgatcatggaattccttgacggaatgacagtccaccaggagatgtcgaggttccatcctctgattagtaggcgacctcatcggctatcgatgaccgatttttcacgctggtgccgagaggtcgaagatcgcttgaggaatgtcacgagggtcatggccgggtgcggaatcgttcacggggatcttcatcccgcgaatctgatacatgtcggccatgaggttttggttactgactttgaatcctgctcaatcgacggggtcgccgtctcgtcagggatcgccgctccctggttccagtcggacgacacgattcccgatccggcgacgactgacgatctccacactcttctcgtggatccgacttgcggccccgcgcttgtcccccatccaaatcttcgcgcgctcatcagccaggccgcagtcgaggacatgatgggaaatccgactggtttaccacatgcctggaacctcgaggacatgacaagcgaactcgccaaggggatccgggcatcagccactcccgcacgagccgaccgcctctttccctcagacccctacctgttcgggcatccaggttcagaattcggcctgatgcatggcgccgccggaatcatggctgctcttgccgtgactgggtacggtgttgacgcgaatcacgtgacctggatgaaggaccgcttggccacccgcccgaccctgctgccggggttggccaacggaatcgagggaattgccctgggtctctccctgtgcggtcagaacgacatggctgcatccctgctccaccagtccggaattctcacgatcacaacgaacggatcgactgacctcaccctcggtactggtatggcgggccgagcgtgcgcgctgcagtccctctcacaacgactgtcatcgaaatctctcgcccacgctgcatataccctctgggaacaactcgccgtggctgtgcggaacactgatgtggccttgccgaacggcctgttctccggttgggagggaatcgggctctccctgcttgcctctcccctgccggatcgtcatgatctcgcccgccactcactccgactggccctggccacgacaacgattgttgacggtgcgctcttctcaggcgagggacagatccgatggccatatctggggcgtggtcccgcggcatgtggcccgctcgccgccaggcttgatgatgaccagacggccaaggccgtggcacagacctgtcgttgtcccctgactgagtcatccggtctccacaatggccgcgcaggtctcctactcgtcctccgccagctcgtgggagaccaagacgacgccgttcgccgccacctcatgagactgtcgtggtcgatggaccgtcgcgaggaaggcacattgctgctgggtgatcatggcctgcgtttctcatccgatctcgcgacggggtcagccggcgccctcctcgccctgagcagggacccatggcggaacatgacacgaatgctcggaatatgcgatgacacctgtcatggcccactagtgacagtttgatctagcgccgatagttcacaactgaaagactccaaacatcgaggaaaacatgctgagccaaaacgccttggcaggcgtggctcgtttcaccacgatgaacaccaggagacagaatgtccgttgaggccatgcaatccatcgagatggacgaggaaaacagcgccagccagacagtttgcgcttgttacagcttcttctcgtggtcaggatgctgcgtagtctcccaagcggtggaagcatcttgatcgtgtgagacaccgtcgactaccctgtcccccgtggtacgcacacgccccgtcctggacagtcccggaagaccgctcatcgcctccggagtcgtcctggcggtcctgctcatcatcgcggtgatgacgatggtgcttcagcgcgaccccactctcacccccggacgccgcattctcggtatcgtcctgtccacggtccaggccgtcggattcatgtggctgcagacccgcatggttcgtcacggcaagggttcgcgcaacatgcgtgcgacccttggaagggtcggtttctgggccacgtggggactcgtcgcagtgggagtcgtcaatctgtggctgaccaactcgtggaccctcttcggggcctccgtcgccacgcccctccttctcctgccaggggtgtggagtgtggtggccaccctcgtgaccctgatcgtcggtttctccgacctcgtggtcacccacacctcgccactgacctcagccacggtcgtgctggtgaccatcgcggtgtcggtgaacctctacgcattcacgaagctgtcgacggcactcgttgaactccgctcctcccaggaggagatcgcccggctgcgcgtggacgccgagcgtcaccggatatcgcgggacctccacgacatcatcggtcgcaccctggtcgccacgtcgatgcgccagcaggcggccctccacctcgtcgaccgcgacccgcaacgggccaaggaacagctcgacgccgcccatgacgcaatcaccgaggggcagcaccagttgcgttccatcatccaggccgagatgagcaccagcctccccgacgagatcagcgacgccacattcctgtgcgaccgactccacatcgacttccgcatggatgaccgcggcagaccgcacaaacccttcgactcggcggcggcggcggccctgcgcgagggaatcacgaacatgctcaagcacagcgcggcgggctactgccacgtcgccatctccccggacctcctgaccgtcaccaacgacggttgtccgcaatcacctcgcccctccaccacaccgggcaccggaatcgaccatctccggtcccagatcgaggcgctcggtgggtcggtgacgacgtcgcggccctcgcggggcaccttccggctccgctgctccttcccgacccggggggcgtccacgaccacacccgcgaccgaaggaggacgatgacgacgagaatcctcctcgccgaggacatcaaactggtggcagaggccttcgaggcactgctctcggtggaaccggagttcgaggtcgtcgcacgggtggcacgcggcgacgacctggtcacatccgccacccgcctgttccccgacgtgatcctggccgacatcgacatgcccgggatgaccggcatcgaggccacccgaatgcttcgcgacaagggataccgcggcagaatcatcctgctcaccgccctgccgggaagcgggcacctgcacgccgcgatggctgccggagccgacgggtacctgctcaagtcgatcaccgcgccctccctcatcaacgccatccgggcggtgtgcaacggccagtcggccatcgacccgaacgtcgccgcggtcgccatgcgcaagggaccctcgcccctcaacgaccgggaaaccgagattctgcgcctagtcgccgacggttcctccaccgcgcagatcgcctcgcggctgtacctcagcaagggcaccgtcaggaactacctgtcgacggcgatgtcgaagctcgacgccgactcacgcacagcggcggtcacgcgggcacgcgaggagggctggctgtagcaggcgacccgctcagcccaccgcccctcagcccgccgactcctgacgcacggcctcctcgaccgcccggctgagcagggacccggccctgaccatcgacgtctccgggtccggctcgagatcggacaacgcgatgatccggtcgaacgcggaccgtttctcctcgggcaggtcacagcgtccgcacaccgcccagacgggcaccccggcgtcccgggcgatcttgcggatggtgtcgggaagcttgccgagcagggtctgctggtccagccgcccctcccccgtgacgacgagactggaggcggagatccgcgacaccgcgcgggaccatcccaggacgaccgccgcgcccgggcggtacctggtccccaggcacatcagcgcccagccgacccggctgggcggctgcgaaccccctggccaccgcccggcaggcctttcccgaactcagcgaccccttgaaggagtcgacggcaacgatgaccggcgcattcggatcaggacgcatgggatcagcatgtcacgtcgatacggagcagtcgcgccgcctacccctagactcgggggcatggtcaaccgagtctacctgtccctgagcgttctcgccctcgtgctgtgggtggtcgcctaccgtcacatgccgggctgggccgcgggcatcaccctggtgggcatcgtcgtgctgtcgctgtggtgcgagtggtcgcgggtgcgcaccctggccaggatcggcaagtcccgccagcagggcccccgctcctcccgaggacgcaacctgtcgtgagcaatacgattcccgcagccctccaccccggccctgacgaggcc

SEQ ID NO: 430 - DNA, 26620 bp, Propionibacterium acnes
  source 1..26620: mol_type = genomic DNA
ccttgtggacaccacgtcatccacatgacttgtgtcacatgattcccggaccatcatcaagcagatgctcacccaactgtaatgatttctgttctgaatctggacatgctctgacctgcattcaatgatcaattccgtgcgatattccacaacgcacggagaggtcacagacaatgataacagaaagcatccccacgcggctgctcgtgtggcacgagcagaccgatccgaccaagctcctcaggatcaccgacgcgatcaggaggggggatccccttccccccatcgaggccatggcgatcggccacagattcctcgtcctcgacggtgcgcaccgggcccaagcccaccagtactgccatcgatctgagatccgagcccgcctccacaacctccccctcagcgcggaagtaccaggctggagccactccataccccgcgatgcagcagcgaaactggctcacctactcctccccgtggacgctctcggtcaggcggaaatcgtcctgcacggggtgcgccgtcaggtggggaccgcttcacaacgaccgcgcgacatctttctcgcctgccaccggatcgcgcgagttgcctacgcgcatggaatcagacctctcggcccggagctctccaacgctccgacgatcgacgccgccaccatgacctggcgcccgccgaacgtgggcacgttgtgggccatcgccagcagtctcggacccctgcccgcaactgtgacccggttcgccccgatcctccggcacgacgccatcggggattccgcgatgacacccgtcacctccgccgcgtgacgacccgcgccaattccgccccaccactggatgaggggcagccgcgtggacgatgctcctgttcaggcagggactccatacgagaccaataggaaaatcatgatcaaaaacacaagccctctgaccgtgaaaaatgtctcgaaaacattccgtggctccagcggagaagccatcaaggccgtgcaagacgtgtcattcaccgttgagcgtggtgaggttgtggcattcctcggcccgaacggcgccgggaagtccaccaccatcgacatggctctcggcctcacccgccccgacagcggccagatcgaggtcttcggtactgacccgctcagcgcggcccggtcgggacgctgcaccgcgatgacacagaccggcgggttgctgcccgacctcacgattgggcagaccatggagatcatctcctcgctctatcgtggctcccacatgaatgcctgcatggagcgagcaaggatcacgcatctggccgatcggcaggtgtcgatgtgctcgggaggcgagcgccaacgacttcgcttcgcactggctctgctgcccgatcctgacttcctcatcctcgacgagcccactgcggggatggatgtggaggcgcgccgggacttctgggcagagatccacgaggacacgcgtcgtggtcggacaattctgttcgcaacgcactacctcgacgaggtggacgagttcgccgatcgggtcatcctcatcaaggagggccgcgtcatcgccgacgacacctccgacgcgatccgcaccatgtcggggggttgcaccgttacggcgaccattcccgacttctccctggcacgactgaatctgccgggcacccaactcatcaagcagggcggcgcacgcgttgatctgcaccatcccgattccgatgccctcgcagcgcgagtcatccagctcggcggcaccgacctgcgcgtggtcccccgcagcctcgacgacgccttcctcgctctcacctcaaccaccaaggagtcctgacatgaccgcccaagcgcttcccgcagtcgccactcccaaggcccgccaccgatccgccatctcgctgaagtacttgtggtgcgagatgcgtcgccccttccggcgttcgacgatgctgttcaacctcgccctccccgcagttctgtacctggccctgttccgcaccgtccacaccgccgagctgccggacgggaacttcgcgatgtggatgatgatcggcatcgctgtctacggagcggccactgcgagcaccagctacgcagcctccatctccgtcgacgaggccaacgggtggacccgcaccatccgcctgacgccgttgtcgtcggtcgggtacgtgctggtgaaggtcctctgcgccatggccatcgccctggccccgaccctgctcatcggtctcatcgggctgttgaccggagctcacggcacgctgcgggtctgggtaatcggactgggggcggcttggctcagctcagcaatcttctccgccttcggcctggctctcggactgtccctgcgtcccgaggtcgtcatgcacgtccccggcctggtcatcaccggtctggcgttcctgggcaacgtcttcgtccccctcagcgggacgatgctcaccattggccgctggagccccgcctacggcatcaccgcgctggctcgttacccgctcaccaacggcatcgacatcgggggcggccacgactccctgacggctgccctcatcggcaccttctgctggttcgccggattcgtgttctgggcctcccgtcgatttaccaagagcacgggtcgtcagtgacagattcggccgatctccggaaggagcagtgttatgaccaagcccctcattgcagtggtcaccgcgggccaaggagcgcagaagcctcgcctgctcacgccatggctcaaggtccccggcgtcacggagaagcttgctgcatggtccgctcaggccgatgtggacctcgtcgagctcggtaccagggcgaatgcagaaaccttggcagcgaccgagaatgcgcagccactactggtctgtctcggagtcctcgtctcggatctcctggccgaccagaacattgtgctcgcaggacactccgtgggcgagctgacagcagcgtgtctcgccggggtagttgatcccgggacggccgtcactcttgcacgacggcgtggactggccatggcgcgggcctgcgctctccacccgaccaccatggcggccatcattggtgacaatccggatgacgtcctccggcggctctcggaactgggactcacggctgccaacatcaacggaggcggacagattgttgcggccggctccaccgacgcgatcgcggaactggtggcgacccctcccaacgggaccgcagtcaagccgttgcgagttgctggcgcctttcacaccaagtacatgacgcctgcgcaggacgctttcgcccaagctgctcaggacgtcaccttctccgacccgcagcacccgatcatctccaacctcgacgggcaggagatccggtccggcaatgacctgcgtgaacggctgattgcccaggtgaccgcgccagttcgatgggatctctgcatccagcagatcgcggatcgtcagccggaactcgccctatcggcccctccggggaaggtgcaggcgtcgctcttgtctcggcagatcccggacctcgcgacggtctgcatcaccacaccacgggaggcagcccaggctgcacagcggatcgaccagtccgtatccgtccttcagggggcatgatgctcatccccgagtacttcctcacagcctgttcggaccatgctgagcgcctggcgatcatcacccacaatgacgttgtgacgtgggccgaactggcgactcgcgtcgacggttttcggcgctggctgcgggaccatggcgtgcaccgccaggacagggtcgttctccagacgccaagcaccgtaggcacggtagccctcatgtgggcctgcctgctcgacggcgtgacgatggtcccggtgcaccaggacctcactgcctcccaggtgcagcaagtcatcgacgactgccgtccagctctggtgtgtggcagcccggacctcgtccaactcctcaactcccccggaatgaagacaagcacacctccaacgcggccggagtcaacgagtattctgccgtccttgtcccgggtcagccccgatgaccttgcgatgctcatctatacgtccggcacgacgggtctcccgaaggggatcatgtgtccccaccggcaggtcgccaccgccgcacggatcgtccatgactgtctcgggtaccgcacggacgacgtcattctctgtcgcctgccgttgtccttcgactacgggctctatcagattctgatgtctgccatctccggtagcgcggttgtcctgcgggacggaggcgcgcaggaccgcaacctggtgcgcgacatcgcccgtcacggcgtcactgtcgttccagtcgtgccgtccatggcgtcaatgctcatcaccctgcagcgtcgtgatcagttgccgaccatcgtcagactgttcacgaataccggggcgcgtctggcacccgagaccgcgaaccagttgctcgcaagcttccccggctcccgctatgcgtcgatgtatggcatgacggagtgcaagcgcatctccatccttccggtggaggagtacgagacgcatccggacagcgtgggaagagctctgcccagcactcacgtcgagatcgttgacgctcagggagttccggttccggcgggcgagcacggggagatcacggtgtccggcccgaccgtgatgaacggctactggcaggtgccgaacagtcccagtggacgattccgacccagcggccacggcctcactctgttcaccggtgatcgcggctggatggatgaggagggacgtctctacctcctcgggcgcgacgacgagatcgtcaagcatcacggcatccgaatcagcctgcaggagatcgagatagccgccgaagccgcgccgggcgtcgacgcagtcatcgctctcaagccggcctccgactcggcccccattgaaatcgcctactgcggcagcacgagtcccgagaacctggcccgccatctcgaaaccgtcctggaccgggcgcgacgaccccaattcatccaccaactccagcagatccccctgacccgtaacgggaaaccaaaccggtcagcagccgccgaggccatccgctcaagggcgtgacggcgaaggccaacacccacagacgaaaggaaaccaccatgacccaggccgagttcaaccagttcatcgagtccacctgctccgcgacgatcgtggatcccgaccgtcctttggtcgatcagggcatcgactccctcggaatgctcaccctcatggtcgctatcgaggacagcctcggcatcgaactggatcccgagtccctcgccgacggtaggggttccacgccctccggtcttctgtcccttgtcgagcagccgaaagcgacggtgtgacgacatgacgacgatggttccttgccgccgtgtggagatgccgcaactgttcgaccacatccccggaagcatctctctctcaggagggctgcccgatctgagcgtgctcccgagcaatcagatcgccgaactgacgtcccggatcatgcgtctcggctcaagaatcctcctgcaatactccaccccttcggtctcgtcctccttggtgccggccatcctggacctggcggaacgaacatgcatgtcaccggatccgcggaatctgatcccgaccgcgggttcccaactgggcctggccatggtgatcaatgcctttgacggcgatgagatcatctgtgactgcgccacctatcccggggcgctggccgccttcgcctctgccggcgtggaaacaacgggggtggccagtgacgaggaggggctcaacccagacgcgctcgctcacgccgtcgcagagggtcgggccaatggccgccgcatcgcagccgtctacaccacgcccaccttccagaatcccaccggctccgtacagtccgagaaccgccgtgcggccctgctcaaggtgtgtgctgacaatgacctcctcctcatcgaggacgatccgtacggcatgctgtccttcgacgggcagacgtggccagctctgaagtccatggacccacagcgcgtcatctacctgggcaccttctcgaaggtgttcgcaccgggcgtccgttccggctggatcgatccgcccgccaatcttgtcgagaaactccgcgctgtgtgcgagatcatgacactctcgccatcagccctcaaccaagcgatcatcggcgagtaccaccgtcgtcacggatgggacgaactgttggagggctatcgcgcctcctaccgcgaccgagcccgtctcctcatcggggctctcgaggctgaactggcaagaacgaattgcactggcacgtggacctggcgtgaaccacggggcggcttctacctgtggttggagaacgtcgccagcaccagcggtatcgacgttgcgcgtcgcgccgccgacaacggagtggccgtggtgcccgggaaacacttcgacgcagccggacacgattcgccgagcctgcgggtgtcgttcagcaattcacgcccggctgatctggtcgaaggagctcgtcgtctcgcccgtgcactggtgggagaggacgttcagaaatgactctcgcgacacgcaccgccaccgacaccctgcagcagaccttgccctggggcacccacgaacgtctcgtcttcgggcgggcgctcctgcgcagcaccggcttcccagccgaaggcttggccctgctcgactccgacgacatcctccccctcctcgactcctttcttgccggggacatcgacagaactcacttcgagaaggaatacaccagtcgcgaggagtccggcgcaagggcgctcatcaacgtcttgaaggacgatgcagtatcgcgcgccatcgcatggcagaaccccaccgcgtggaggtccttcgaatccctgtcgtccacgagcggaatcaatgcttcgactcggcgcaaggtacgccaactcgccctctactggcaacgttactgttccaaggctgagaccattggatacttcggcccgttcgcctgggccgaagtcgacccggaggcctctgcggtcgaattcatctcctccgaccatctgatcgaccgttcccacgtcgcaatggaggcgtgggcggtcattgagatcgggaaagccctggcatcacgggccgaccttcagtggtggatgccaccaatcctgtcccccgccgtcgacctcaacatggagagaggcaccgtgacggtggctggacaccagccacgacgggtccgggaggacgaggcacgagttctcttcctgaccgacggcacccgtcccgccgcccagatcgccaagagcctcgacatggagcccgagcggttgcgcaggatcctcgtggcccatgaacgtcgtcacaccgtgatctgggacgccaacatccctgtctcagtgcacgcgtgggacatcctgcacgaacgcattgcccagatcggagacgctgggctgcgagatgaggccactgctgttctcacgaggttcgacgagcttctggaggtcatccgcaacattcccgacgcccggtccctgacggaggcgacggaatccctgtcccgtcttttcgaaaccgtgacaggaacctcttcgaacagacgtgcgggccaggcatatgcagcccgcagcctgtgctacctggactgcacccgcgccggaaccgccaaggttgggacccggcttctcgaagccctcgacgcccccctcaacctcgtcctacaatccgctgactggttcgcggcgaccttggcaaaggaatacaccaccgaaatcacggacctcgcaaatcgaaagcagcgggcctcccaccagccactgaccatggctgatgtctggccgtccacgatgtcgctgttctggggggactcaccgtccccactgcagcgagccgtgaccgaactgtcacggcggtggagcagagtcctcgaggggctgcagccagtcgacggtcgcatcgacacgacatcgtccgctctctcgggcgccgtggacgagcagttccccgtgtgcaccccgattccagaactgtcagtgcacagcccggacctccaggtcatcacctcgagcactagcaacatcgcctccggacgaatcactgcagtcatgggtgagctacatgcctgtctgagcagtctcgacatgccgttgctcgagtggtcgctgccccatggttccattcgcgatcgcatcaacaccgcgctcaacctgcgacgtctggttcccttgttccccgagacatggaggcgcaacaccggccgcatggttccagcgacggtcggagtgggggatcgcgcaatcgggttcactcggacggccgatcaagaccgtgcgaacacatggtcgatgtcggcactgctgttcgagcagaccgaggacggactcatgatccgtgatcccgatggcaggctctggaccatcgcacaagcgtggagcgtgcccatctccatggtcgccgccgatgcgttcaagatcgggctgcccggctcaccagcccctcggctcaccattgacaatctcgtcgtgttccgtcgtacctggaggtttcccgctggctccatcgacatcatgcacggttcagccgccgagaaacacgctcggctgagggagtggcaggtcacgaatcaccttcctgaccacctcttcgtcaagttcccctccgaacccaagccgatctacttctccttcgagtcccccgccatggccacggtcttcacgcgatcactgcagcgcgacgcccgagagaatccagacagtctcgtgacgatgtccgaagcactgcccgagcctcaatcctcatggctgcacgacacccggagccaccactacgtccacgaattccggctgcaactgaccaaggagcgacatgacgaccacagttgagacacatcccgaaacacgtggcacaaccgcgacatccatctccaatctgatcggtcacacccctctcgtaagaatggaccatctgttcgacggcctccccttcgaggtgtacggcaagctcgagaagctcaatcctggcggaagcatcaaggatcgagcagcacaatccatgatcgaacgggcaattcgacggggtgagatcgtcccgggccgtacgaccgtcatcgagtccagttcgggaaatctcggcatcgccgtggcgatgctgtgccaggagcacggcctgaatttcatctgcgtaaccgatgccaaggccacgccaacgaacattcgactcatcgaagcgttcggggccactgttgaggtgatcgaagaacctcatcccgagagtggcgaattcctccccatgaggctcaagagggtaagagaactgctgtcagagattccagatgcatggtggccgaatcagtacgggaaccccgacaatccggcggctcacgagcggactgtccgcgagatcatcgaggcaatcccgcgggttgacacgattgtctgcgcgaccggctcgtgcggaacccttcgcggctgccacgaagcattgcgaaagctgtccccacgcacccgactcgtcgccgtggacgccaagggcagcgccatcttcgacgaggcaggagcaccccatccccgctgtgtcccgggacacggtgcgtcagtgcgaccgccgctgtggcgcgcggggctcgccgaccaactggttctggtctccgacgcggactgcgtcgtgggatgccaggaggccctgcgcaccgaggctcttctcctcggcggatcctcgggagcaattctgacggccattcaccgagtgtctcccacgattcccgctggttccaccgtggtgacgatcctccccgacggcggcgagcgctacatcgacaccatctacagccgctcgtgggtcgactcacacatccccgggctgccctctctcgccgactggggggctcccaaccccgccaattcgtatgacctgaacagaagtgcctcatgaagctctacaccagagagaccgtcgaaactgcgcttgtcgggcgtcatggccaggttctcagtgccgtacagagtgcatacatgctgcattcgacgggagagacatcgctgccattctcaaccttcctccgcccggccgggtatccgaacgatcggatcatcgcacttcccgcccacatcggaggcgacttcgacatagccggtatcaagtggatctcatccttcccggaaaacctcgaccggggccagcaacgagcttcctccgtactcatcctcaatagtctggagacgggatacccgaccgccctgctggagtccagtcagatttcagcaacgcgaacggcagcatcagccgccctggccagcgccaccctccatggctccgaagaccatgtcagcacgattggcatcatcggctgcggaacaatcaatcttgcaacgatcgactacctcttccacgtgcacccccagatcaacgaggtcctctccttcgatctgaggcgggagcgggcccatgagttctcgcacctcgtcaaggcttcgcacccagaggcccgggtccgtgtcgccaaggagcccgacgagattctggccgcaagcaacaccatcgcgatcgccacgaccgactcgagtcattggttggaccttccgccgtggcacgggccggggcaccaagtcgtcctgcacacgtcgctgcgagacctgtcagtgccctcgatcctggcagcggccaacgtcgttgacgatcctgatcacgtctgccgtgaagcgacgtccttggatctggcaactcagcagaccggcaaccgggacttcatcacggggagaatcggagacctccttcttggcgcgccgctgtcctcaagtcctgactcccgtgtcattttctcacccttcgggctcggcatcctcgacctcgcagtcgcctccgtcgtcattgctgccgcctcctcttcagcagtcgagatcaatgggttcgaccccgggaaacacgccacaagcatgattgaggtgaatcgatgaccaccacacagatcaacgacaacacggccgttctgcgcgacgtattccccgccggctccgtcgcattcgtgagcggtgcctcacgcggaattggcgctgcctgcgcgacagcccttgcggccgcgggatgcaacctcgccatcacttatcgaaggaaggagaacgaggcggcacaaatcgccgaatccattgaagccatcgggcgccagtgcatcacaatgcagatggacgtaaccgatgagaaccaagtgaccagagccttccgcatcattcgccagcattacggacgcctggacgccgcggtcttgaactcgggaatcaccagtgacgggcatcttgcaacaatgagccgctccaagtggagctcggtgatcgacacgaatctgaccggaaccttcctctgcacgcgcgaggcgaccaaggccatgtactcgtccggtggctcgatcgtcatggtcgcgtccaccagtggagttgcagggcgaccgggccaggccaactacgcagccagcaagggcggaatcgttgccatgatgaagacgctggccccggaggttgcggcaaagaacgtccgggtgaatgcggtggcacccggcttcattcagaccgacatggtggcggccgttccaaaagcggcactcgcccaggcaatccaacacatccccatgggccgtcttggcctggcacaggaggttgcgtcagccgttaccttcctggcctccccgctcgccgcctacatcacagggaagaccctcactatcgatggcggaatgatcaacggctgaccccaggacccgcacacccccagtaccgagaaaggaacaacaatgaccgagatcacccacactgccaacagcatccgaacccgcgccgaggaacgttccaacaaagcttggcgcctgaaggaggagatcatctccaagctcggtctcgagaccaagccagaatatgtctcggacaaccaaccgctcttcggacgtggccttgagatggattcccttgacactctcgaagtcgtcgtcgccgtcaacaatgagttcggagtctcggtcaacgacgacgacgtacaggcgttcggctcgatcaatgccatggtcgatttcatcgaggtgaactagaagtgagttctcttgcgctcgaggcgccacccaaggacgcccgtaagaaattcgcctacgacagcgatgccatcaagacgatgctcccacatcgttggccgatgctcatgattgatcgcgcctacgacgtcgtcccagggaaatcgggcaaaggcatcaagtcggtcagcgtcaatgagccgttcttcgccggtcactaccctgaccattccatcatgcccggcgtcatgatcgtcgagtcgatggctcaactcgtggccgtcatctacgtagccgaggccattcagaacaatcccggcatgacgtcgcacgacgcacgttcaagcgttggttatctcggcgcgatccgtcagatgaagttccgacgcctcgtcactccgggcgaccaactcaccctccacgcccagctcggcgagaaagtgggggctctgcgcgaggtttccgtgagagcactcaatggccgggatgtcgtcgcccagggggaactcgtcgtcaccgagcggtgacacccagccacacacgagaaggaagtcccatgatcgttcgcccctacaggccacgtgatgcggaagcgatcgtacatctctacaacagccattccgactcccccaatccagtgtcgggagggattgttgaggaggagttccagagggagctcgaagaacgtggttcgacagtgttcctagtggccgaggaggccggatccattgtcggcacattcgggatgttccgcacgaatggccgacacaccatggccgatgatgaagtcttcgccgacatgttctatgtcaccccgtcacatcgactctcgacagttccgggacagctaatcactgaagccatcagcgagtgcttcatccagggcatcaacgtgatccgcctcaccgtgaaccccgcgaacatctccgcgctcaaggtttacagaaaagtcggttgtgcctgtctcggggccaccgatgcaggcgaggacgggaacattgagctgtacaacttcatccctctggttcttagggcaaccatcaccaaactcgaccacgattgtattcgagccctggcggacatgacttcgttcgcctgcatcaccgagggacgtccacttgatctgtcccacgacttcatcgtggacgctggacggaagatcgtctcccacagcatccagatcgggcgttcaaccatccacgccatggtcgacacgggctcgaggaccattgtggaggccaccctcgacaaccgcgactgggatgctcctcgccagatcgtcgcccccaccccctgtcagaaccggcccgaggaacagcgaggcaaccctgtccggctggtgcacaagaagcttgaggtcaccttcaacgaaggagtcattgagatcagtacgactggccactggggcccggtcctcgcaatgtcctggccctcctccgtctcgcaccgcgctcacgggtggcgacagggccccgccaagtcgtatcgatgcgagcttctcgagaattgcctcgtcctggatgacgaaggaggagtgaaatgcaccatcagcctcaatgattgccaagtcgcgatccggatggatggtgccccaaaaacggaattgagaatgtaccagtggtgcagcctgcgccagggctatctgacggctgacaccggcatcacgagcttcaaccgggcatccagtgggctcggagtcgccgtccgggactcgtccgagattgtcgccgcgggccttcccgtcatccctgacacaccgatcacatggagtgagggtgacatcacggttcagctcgatccctgcggccgcgcctccctgatccactcgaccctggtggaccgaagaatccacttggacgagtctggctcggcaagtctcaccatgaccgtgtttggtgattcccagccccatcgtgccgacaccgtcgagctgcctcccctcgcggcaggcaccgacaggatcgtcctcaagccggctgccggaggcgtgaccacatggcgcttgggcgccaccaaggtgctcaagtcaccgtggccacacgcccgcgcgctcgggcccaatccgatctggcgagccggcctgtgggtcagtcacgagccggatcgccacgaccgtcgccaaggaatggggtggggtcccgatcatcgcagttggaccctgtcggaagacaccatgaccagtactgacgggacactctcctggcgcttcagcggctcccccgacaccggctggacggtcgacgtcacgacgagcaacacgcacggggagaccgtcgtctggctcaccccggactgcccggcgggcgagaggatccgcacgtctgatcatgccgtgacgaccatgcttgacatctcgaagccatggcagcgctggaccacccgatgcgcaattcctctcagacacgggaagtggttcctcatcgagcctgatcatgacctcactgattcccccgaaatcctcatgcgctctgttcacggggtcctgctcgtcggctgtgtcggacgagcccactccggatccgcttcctggcgctttgccatcacgtcagaactccccacctccaacccaagaagaaacgactacacctcagccgcctgaacccaaccagttggaacacccactacagaagaaatggagcaccaccatgtccatcactgagcagtacaagacccttcgcacctcggtcggcctccacacgcctaccggtcccctggtccgtatcaccggtgatgatcgtctcgagtttctcgacaccttcctgtcccgcgcctcggacttcgtggaccccgacaccactcgggagtgcctcgctctcaccgaggacggccttccgctgacgatcttcctccacatcgagcgcgaggaggagtcatggctccttccccgcaccgccatcgatgcggcgaccctcgccacgtacctcggcaacctcgagaccgatggtgacctgtcaatcgagattgctccagagggttggggagctgtcgctgtcgaggggccgctgtcgtggcagatcgccgaaaaccttctcgacttcgacgtggctggcctcgttcttcacgccgtcacggacgtcgtcgttcccggggcccccgagggatcgaaggcatggctcgcccgggtcggaaccactggagagtacggctacctgctcgtctccaacgttcccgacctcgcccgcacttatctcctcagccgcgccacggagctgggcggtcaggcagtcgacgccgatgctctcgcacgagtccaggccgaggccgggatgccctattacgcgatgggcgtgtgccacctcgatgtcgccgggggtgacctcgcctggctcgtggactggcagcgcatcggcgagttccaaggatccgagaatctgcccacacccgtccgagaccagcgccgactggccgccatcgccctgcccaccggcaaccgcccggaagctggtcagaccgtcgctgccggggatgaggagattggagtggtggtgtacgtcaccccgtccgccaatcccgatgaggaactcgcgttcgcacttctggatgctcctttctggactcccacccttccgttgaccgtcggtgcccacgacgggaccacggtcaccctgccccgcgtcgtggcagcctccagcctcaacaagctggggtgacagcgatgacgatcactgctgagaacgccaccacccgcagcgacattgcccggagcattgcggtgaccggcgtgggactggtcacggcacagggtgaccataccgacgagtgctggaccgaacttgtcgatggggtttgcggaatcaccatgaacgtcacgttcgatgactctggcaccacgattccgtgtgctggcgtggctcccattccgaactctgattcgatcgaccgctgttacctgctcggcgtccatgccatgcgtgaagctctcgagatgagtggcatcgacctggactccgtgggtcgtgatcgcatcggactcgtggtgggctcaagcctcggcgcgatgcccaccttggaggcggctcatcgccgggccattgagaccggcgtgctcgatgccggattggcggcagactcccagctccactgcgtcgccgaccacctcgccgctgagttcgacatccgtggaccccgcgtcgtgacatcgaatgcgtgtgccgctggtgccgtggcgatcggctacgccgcagaactcctctggtccgacgatgtggacctggtcgtctgtggcggtgtcgatccactggcccagatctctgccaatgggttcacgtgcctgggagctctcgacaatctcccatgcagcccgatggccggttcctccggtctgactctgggcgagggagccgggttcatggtcctcgagagaacagatgcggcggctgccagaggccaggaggtgatggccgaaatcgccggctacggcacaagttgtgatggttaccaccagactgccccggacccgggtggcaatggcgcccgcagctcaatggaggccgccctgcgctcagctcatctcaagccgtccgacgtcagctacgtcaatctccacggcaccggtactccgaccaacgacgccgtcgagccgaaggcactccggtcattgttcaagtccgatgaccttccccctgtcagttcggtgaagggcgccatcggtcacactctcggcgctgctggcgccatcgaggccgtgtgctcgatcaaggccatccacgagggggtcctgccgccaaccgtcaacaaccgcgggcaggcttcccgaactggtctcgacatcgtgccggagtgcgcacgcaaggccgctcccgacgtggtcatctccaactccttcgccttcgggggcaacaacgcatcagtggtcatcaccgcacctcgaggaggcgttcactgtaccgccccggcgcagcttcgcgaggtcggaatctcaggaatggcagctctggcgggaaaggccgccaactcggaggagcttctttcggccctgtcagaagattgtccaatctggatggccgatgagaagacctgggaaggggatgctgtccaaaccggccatgtggacatcaagcgcctgtcccgcacaatcaacccgtccaaggttcgtcggatggaccccttgggaatcatctccagcgcggtggtgactgatctgtatgcccgacacgggaagctgagccgcaaggatgccgaaagcacgggaatcatcttcgcaaccggctacggtcctgtgacggcggtgacgcagttcaatgacgggatcatccgccacggttccgagggtgccaacgccctggtgttcccgaacaccgtggtcaacgcagccgcaggccacctcgcgatgctgaatcgctaccgtggttacacggccaccttggcatgcggtggaaccagttcactcatggcgctgcttctcgctgctcgcgtcgttggccgcggcgctgcggatcgcatcatggtcgttatcgctgacgagtttcccagcattgccgtccaggccgtcgcgaagcttcctggctaccgacacagggttgatggttccggagccgtgctctcggaaggcgcggtatgcgtcctggtggaggccgtcgaagtcgccgaagcacgcggtaccgcccccatggcgctgctacgcggcttcggatcccgtggagagtccgtgggagtcggtcacaccgcatccgatggacgggcttgggccaaggccatggccgctgcactgggcccggccggcctgactgcctccgacgtgtcgaccgtcgtggcggcatcaagcggacatcctcgcgtcgaccgagccgagcaggcggccaggcggatcgtcggactgtccgcaaccgctacgaccttcccaaaggcgattgtcggagaaacacacggatcggctgccgggatcgggctgttcggtgccctgtgcggttcgaggtcagccgcgcaccagaacatccttgtcaacgccttttcccacggcggtggttatgcctcgatggtggtggagtcactgtgaccacgacgcttctgccacgggttgcccagccgggaccgggcgtcagccatgtcgacaccgaccgtcccatcgagtgcatcatcacccaccacccccacatgccgcgtgatcgcggaggccacgccacctccgtgtcaggcaggtacttgctgcgccaagccgcagaactcatgctcggcacggatcctgcgcattgccccgtcgtcgacccttcgcggcgctggtactggcccggaatcaatcttcacggttctgtctcccatgtcccgggctggagcctgacgacgctgagcaccggcggccacatcggggcagacatccaggacttccgggagcgtcccggcgcaatggcattcatcggtgacctggtcaagctgtcgcgatcggcgtcactccgagaattcgcggagtgcgaggccgtcgtcaaggtgtccgaattgactaaggagacgttcgggcacgtgcgactgcccgaatggacacccggatggcgccacgttttcgaggactactgggtctggagtctcgagatgcacgggatgggagtcatcgcactcgcatccgatctcccccgagccattcgctggtggcggtgcgacgccgatgcccgtggccgtctccaggctctccgacccataagcagtcttggaccaggaaggccgtcatgagccggtactcacgtcgaatctcaggcatcgaacgcggctatctcaacgccgcaacccggggcccgcaccccaccatccacacgatgatcgacttcgagggccgcgtccccgccgactgttggcggcacgcatccacgattgcgtcggccgccaaccctggcatgacggtggtccggaggtcgggccgatggacatccgatccagcgggctgtccggttgtgttccacgactggaccgcggaccccaacgacgttgccgacttccacgctgacatggatctcgtgacgggaccatcgtccacgctccacgttttcgagggggcggaacgcacccgaatcaccttggcagcaagccatgccgtgaccgatgggcggggcatcgaacgatttctcgtcgacctgcttgcagcgttggacgagcgtgaacccattggaagccccgacaccctgaccgatgtcgatatcaaacgatccttggagaacagcatcaagccccgacgccacctggccgctgtgcccgccgatgtcctttctccactgggggggaggaagaaccaacgtatatgggcctccaggacgtggcacagtgccccgggagccatgagcggaagaatcgctgccgctgtggccgagatgatcgaccacgccgcaatgatcatcatcccggttgacatccggcggcacgtcccagaggtccgatccacagcaaacctaagtgcccaactgccagtgatcatcaccccgaaccagcgctggcaaagcatccatgggcatctgctcacggaccttgctcgccatcgagaccttgcgatcatcagtgaggatttccgccacaacaatccgttcgcatcgaccttggaggaaagccaggccatcggcctcgatggtgtctatccctgtgccgcaatcatctccgaccacgggaagctcgacctttcaaggttccagaccttggaactcaccccggtctcgatgcgaagcctcccgatgctcgttccctactccgcaatgttcatcagcagttgcaccgtcggcgagaccaccactgtcaccatcgctcatcgcgctgatgacgatcccgattccataaacaccttcttccaccacatcgaatcccagatgtccatctgagccacgtcgtccctggagagcaaacatgaccacccaagatgtcatcaccccgccgcgccccgtcacctcccatgccacggcgaccaggtccgaggctccaccgcgaagcgtcatcagagccatggccatctcgatggtcgcgaccctcatggtcatgctcgacacgaccgtcgtgaacgtgtccttgagcgcgaccaccgcccgcttcgggagcatgggcagcgtgcagtgggtcctcacaagttacctacttgcactgtgcgcgacgatgacggcctccgcctgggtcatcgaccgccttggtccacggctcaccttcatcgcctcaatgaccatgttcctcatcggctcggtgatgtgtgcactgagcgattcagtgtggcaactcgtcactggcaggaccatctccggtgccggagctgggatccttgttccgacagcatccgtcctgcttatccgtggcatcccacgcgaacaacttggcagggtgcaggcactgaatgggagtgtccagttgatcgctcccctgatcggcccgactgtgggcggtctcctcgttgacaggtgcgggggctggccggccatctactgggcgaacgtccccgtagctcttgttcttctgattgaggccgtccgcgtcgatccggacgaaccacacaccgctaagcgccgcctcgatgctctcggcctggtctgtggcagcaccgcgatcgtgctgacagtgcttggtgtctcactcttcggcaggacgtcgcgaaacaccaccttcctgcttacgatcggcgcgcttgcagtcctcgcatgggcgttcttcatcacccacatccgaagggctaccaaccctctgcttgacgtttccctgtatcagaaccctgtctattcatggtccagcttcaacgtagcggtgcttggtttcggtctctacgcccccatggtcgtcatgcccctctatctcgaggcgacgcgccacctcactgccgtccacactggtctggtgatgtcagtggccggcgtcggcgtcattatggccggaatcctgtgcacgaagatcatgggccggatcggtggaggcctcacgatgacagttggcataactctgagcatcatcgccactctgcccctggtccggctgacgaaccacacctcctacatactcctggcagtctgcttggccttgcgtggagcaggaatcagcctgacaatcgtcccagccatgacacgggccttcgagtccatcaagaggacggccatggcggacgcctctgcacagctcaacctgttgcagcgaatcggcgggacaattgcgacagcagtcatcatcgcagttatccaccacgaggccatgctcacccgcggactctcccccacagtgttctcgcacgccaacgtgtggatcctcaccgcgaccgccgtcacccttctgccggccttcgcgcttgcgaaggccgaaagacaacagcaggatctctgagcaccgaggagtactccctcgtagaccctcctctgatctaattgggttcgttccaagtgtgtatctcactccggggagccccgattgctgaaccacatcccgttcaccctggcgagtccctcgtggtacgacgtcccctgggcgcccggatctccgtatctcacaggagatatctcggtcctgccagcggactcgccaaggtggacgacgaccatccggggtccttggcaaatccacatgccacctcgtccgacccttccagaggtggggtggaaagtgcatgtgtctgccaagccatcggaattggaatcggttgcctcagtcgtagcactgtggtgcgtacgccacagcgtccccttcaaagtacttcgcacccgaggtctcgttcacgcgagtcaagtcaagtatgcggaccgaagtcagagcggcaaggtctgcacctgctaccccgacggcgagagccttgagcacttctgctccggtcttgccgagctgcttcagaacgtcgattcacctccggtgtccggcgagctgcgagtcggatcctcccctctgtggttgcgtcacgggagtttccgagaggcatgggcggtgtcatccacaggagtaccgttcccggtctacccgggaacaacacatcctgatcgtcgaggccccgcgcccgcagaatccgatcacgacacgccgtggatccggaggctccgtcggacgaatcgccccagcacggttcttcccatcgacgatgtcagactcctccaccgatcaaatgctggcggcgtgtatcaggcaacatggagagacggcacatcggtagtcgtcaaggaggcccggcacctgtccggacttgatgcggcgggtgtcgacgcccgagtgcggctgcgtcacgagtacgaggccctgagaagactggacccctatcgggccgctccccatcccattgatctcattgagaccgaggacggctcgttcctgatcatggaattccttgacggaatgacagtccaccaggagatgtcgaggttccatcctctgattggtaggcgacctcatcggctatcgatgaccgatttttcacgctggtgccgataggtcgaagatcgcttgaggaatgtcacgagggtcatggccgggtgcggaatcgttcacggggatcttcatcccgcgaatctgatacatgtcggccatgaggttttggttactgactttgaatcctgctcaatcgacggggtcgccgtctcgtcagggatcgccgctccctggttccagtcggacgacacgattcccgatccggcgacgactgacgatctccacactcttctcgtggatccgacttgcggccccgcgcttgtcctccatccaaatcttcgcgcgctcatcagccaggccgcagtcgaggacatgatgggaaatccgactggtttaccacatgcctggaacctcgaggacatgacaagcgaactcgccaaggggatccgggcatcagccactcccgcacgagccgaccgcctctttccctcagacccctacctgttcgggcatccaggttcagaattcggcctgatgcatggcgccgccggaatcatggctgctcttgccgtgactgggtacggtgttgacgcgaatcacgtgacctggatgaaggaccgcttggccacccgcccgaccctgctgccggggttggccaacggaatcgagggaattgccctgggtctctccctgtgcggtcagaacgacatggctgcatccctgctccaccagtccggaattctcacgatcacaacgaacggatcgactgacctcaccctcggtactggtatggcgggccgagcgtgcgcgctgcagtccctctcacaacgactgtcatcgaaatctctcgcccacgctgcatataccctctgggaacaactcgccgtggctgtgcggaacactgatgtggccttgccgaacggcctgttctccggttgggagggaatcgggctctccctgcttgcctctcccctgccggatcgtcatgatctcgcccgccactcactccgactggccctggccacgacaacgattgttgacggtgcgctcttctcaggcgagggacagatccgatggccatatctggggcgtggtcccgcggcatgtggcccgctcgccgccaggcttgatgatgaccagacggccaaggccgtggcacagacctgtcgttgtcccctgactgagtcatccggtctccacaatggccgcgcaggtctcctactcgtcctccgccagctcgtgggagaccaagacgacgccgttcgccgccacctcatgagactgtcgtggtcgatggaccgtcgcgaggaaggcacattgctgctgggtgatcatggcctgcgtttctcatccgatctcgcgacgggatcagccggcgccctcctcgccctgagcagggacccatggcggaacatgacacgaatgctcggaatatgcgatgacacctgtcatggcccactagtgacagtttgatctagcgccgatagttcacaactgaaagactccaaacatcgaggaaaacatgctgagccaaaacgccttggcaggcgtggctcgtttcaccacgatgaacaccaggagacagaatgtccgttgaggccatgcaatccatcgagatggacgaggaaaacagcgccagccagacagtttgcgcttgttacagcttcttctcgtggtcaggatgctgcgtagtctcccaagcggtggaagcatcttgatcgtgtgagacgccgtcgactaccctgtcccccgtggtacgcacacgccccgtcctggacagtcccggaagaccgctcatcgcctccggagtcgtcctggcggtcctgctcatcatcgcggtgatgacgatggtgcttcagcgcgaccccactctcacccccggacgccgcattctcggtatcgtcctgtccacggtccaggccgtcggattcatgtggctgcagacccgcatggttcgtcacggcaagggttcgcgcaacatgcgtgcgacccttggaagggtcggtttctgggccacgtggggactcgtcgcagtgggagtcgtcaatctgtggctgaccaactcgtggaccctcttcggggcctccgtcgccacgcccctccttctcctgccaggggtgtggagtgtggtggccaccctcgtgaccctgatcgtcggtttctccgacctcgtggtcacccacacctcgccactgacctcagccacggtcgtgctggtgaccatcgcggtgtcggtgaacctctacgcattcacgaagctgtcgacggcactcgttgaactccgctcctcccaggaggagatcgcccggctgcgcgtggacgccgagcgtcaccggatatcgcgggacctccacgacatcatcggtcgcaccctggtcgccacgtcgatgcgccagcaggcggccctccacctcgtcgaccgcgacccgcaacgggccaaggaacagctcgacgccgcccatgacgcaatcaccgaggggcagcaccagttgcgttccatcatccaggccgagatgagcaccagcctccccgacgagatcagcgacgccacattcctgtgcgaccgactccacatcgacttccgcatggatgaccgcggcagaccgcacaaacccttcgactcggcggcggcggcggccctgcgcgagggaatcacgaacatgctcaagcacagcgcggcgggctactgccacgtcgccatctccccggacctcctgaccgtcaccaacgacggttgtccgcaatcacctcgcccctccaccacaccgggcaccggaatcgaccatctccggtcccagatcgaggcgctcggtgggtcggtgacgacgtcgcggccctcgcggggcaccttccggctccgctgctccttcccgacccggggggcgtccacgaccacacccgcgaccgaaggaggacgatgacgacgagaatcctcctcgccgaggacatcaaactggtggcagaggccttcgaggcactgctctcggtggaaccggagttcgaggtcgtcgcacgggtggcacgcggcgacgacctggtcacatccgccacccgcctgttccccgacgtgatcctggccgacatcgacatgcccgggatgaccggcatcgaggccacccgaatgcttcgcgacaagggataccgcggcagaatcatcctgctcaccgccctgccgggaagcgggcacctgcacgccgcgatggctgccggagccgacgggtacctgctcaagtcgatcaccgcgccctccctcatcaacgccatccgggcggtgtgcaacggccagtcggccatcgacccgaacgtcgccgcggtcgccatgcgcaagggaccctcgcccctcaacgaccgggaaaccgagattctgcgcctagtcgccgacggttcctccaccgcgcagatcgcctcgcggctgtacctcagcaagggcaccgtcaggaactacctgtcgacggcgatgtcgaagctcgacgccgactcacgcacagcggcggtcacgcgggcacgcgaggagggctggctgtagcaggcgacccgctcagcccaccgcccctcagcccgccgactcctgacgcacggcctcctcgaccgcccggctgagcagggacccggccctgaccatcgacgtctccgggtccggctcgaggtcggacaacgcgatgatccggtcgaacgcggaccgtttctcctcgggcaggtcacagcgtccgcacaccgcccagacgggcaccccggcgtcccgggcgatcttgcggatggtgtcgggaagcttgccgagcagggtctgctggtccagccgcccctcccccgtgacgacgagactggaggcggagatccgcgacaccgcgcgggaccatcccaggacgaccgccgcgcccgggcggtacctggtccccaggcacatcagcgcccagccgacccggctgggcggctgcgaaccccctggccaccgcccggcaggcctttcccgaactcagcgaccccttgaaggagtcgacggcaacgatgaccggcgcattcggatcaggacgcatgggatcagcatgtcacgtcgatacggagcagtcgcgccgcctacccctagactcgggggcatggtcaaccgagtctacctgtccctgagcgttctcgccctcgtgctgtgggtggtcgcctaccgtcacatgccgggctgggccgcgggcatcaccctggtgggcatcgtcgtgctgtcgctgtggtgcgagtggtcgcgggtgcgcaccctggccaggatcggcaagtcccgccagcagggcccccgctcctcccgaggacgcaacctgtcgtgagcaatacgattcccgcagccctccaccccggccctgacgaggcc

SEQ ID NO: 431 - DNA, 26620 bp, Propionibacterium acnes; identical to SEQ ID NO: 430
  source 1..26620: mol_type = genomic DNA

SEQ ID NO: 432 - DNA, 26636 bp, Propionibacterium acnes
  source 1..26636: mol_type = genomic DNA
ccttgtggacaccacgtcatccacatgacttgtgtcacatgattcccggaccatcatcaagcagatgctcacccaactgtaatgatttctgttctgaatctggacatgctctgacctgcattcaatgatcaattccgtgcgatattccacaacgcacggagaggtcgcagacaatgacaacagaaagcatccccacgcggctgctcgtgtggcacgagcagaccgatccgaccaagctcctcaggatcaccgacgcgatcaggaggggggatccccttccccccatcgaggccatggcgatcggccacaaattcctcgtcctcgacggtgcgcaccgggcccaagcccaccagtactgccatcgatctgagatccgagcccgcctccacaacctccccctcagcgcggaagtaccaggctggagccactccataccccgcgatgcagcagcgaaactggctcacctactcctccccgtggacgctctcggtcaggcggaacatcgtcctgcacggggtgcgccgtcaggtggggaccgcttcacaacgaccgcgcgacatctttctcgcctgccaccggatcgcgcgagttgcctacgcgcatggaatcagacctctcggcccggagttctccaacgctccgacgatcgacgccgccaccatgacctggcccccgccgaacgtgggcacgttgtgggccatcgccagcagtctcggacccctgcccgcaactgtgacccggttcgccccgatcctccggcacgacgccatcggggattccgcgatgacacccgtcacctccgccgcgtgacgacccgcgccaattccgccccaccactggatgaggggcagccgcgtggacgatgctcctgttcaggcagggactccatacgagaccaataggaaaatcatgatcaaaaacacaagccctctgaccgtgaaaaatgtctcgaaaacattccgtggctccagcggagaagccatcaaggccgtgcaagacgtgtcattcaccgttgagcgtggtgaggttgtggcattcctcggcccgaacggcgccgggaagtccaccaccatcgacatggctctcggcctcacccgccccgacagcggccagatcgaggtcttcggtactgacccgctcagcgcggcccggtcgggacgctgcaccgcgatgacacagaccggcgggttgctgcccgacctcacgattgggcagaccatggagatcatctcctcgctctatcgtggctcccacatgaatgcctgcatggagcgagcaaggatcacgcatctggccgatcggcaggtgtcgatgtgctcgggaggcgagcgccaacgacttcgcttcgcactggctctgctgcccgatcctgacttcctcatcctcgacgagcccactgcggggatggatgtggaggcgcgccgggacttctgggcagagatccacgaggacacgcgtcgtggtcggacaattctgttcgcaacgcactacctcgacgaggtggacgagttcgccgatcgggtcatcctcatcaaggagggccgcgtcatcgccgacgacacctccgacgcgatccgcaccatgtcggggggttgcaccgttacggcgaccattcccgacttctccctggcacgactgaatctgccgggcacccaactcatcaagcagggcggcgcacgcgttgatctgcaccatcccgattccgatgccctcgcagcgcgagtcatccagctcggcggcaccgacctgcgcgtggtcccccgcagcctcgacgacgccttcctcgctctcacctcaaccaccaaggagtcctgacatgaccgcccaagcgcttcccgcagtcgccactcccaaggcccgccaccgatccgccatctcgctgaagtacttgtggtgcgagatgcgtcgccccttccggcgttcgacgatgctgttcaacctcgccctccccgcagttctgtacctggccctgttccgcaccgtccacaccgccgagctgccggacgggaacttcgcgatgtggatgatgatcggcatcgctgtctacggagcggccactgcgagcaccagctacgcagcctccatctccgtcgacgaggccaacgggtggacccgcaccatccgcctgacgccgttgtcgtcggtcgggtacgtgctggtgaaggtcctctgcgccatggccatcgccctggccccgaccctgctcatcggtctcatcgggctgttgaccggagctcacggcacgctgcgggtctgggtaatcggactgggggcggcttggctcagctcagcaatcttctccgccttcggcctggctctcggactgtccctgcgtcccgaggtcgtcatgcacgtccccggcctggtcatcaccggtctggcgttcctgggcaacgtcttcgtccccctcagcgggacgatgctcaccattggccgctggagccccgcctacggcatcaccgcgctggctcgttacccgctcaccaacggcatcgacatcgggggcggccacgactccctgacggctgccctcatcggcaccttctgctggttcgccggattcgtgttctgggcctcccgtcgatttaccaagagcacgggtcgtcagtgacagattcggccgatctccggaaggagcagtgttatgaccaagcccctcattgcagtggtcaccgcgggccaaggagcgcagaagcctcgcctgctcacgccatggctcaaggtccccggcgtcacggagaagcttgctgcatggtccgctcaggccgatgtggacctcgtcgagctcggtaccagggcgaatgcagaaaccttggcagcgaccgagaatgcgcagccactactggtctgtctcggagtcctcgtctcggatctcctgaccgaccagaacattgtgctcgcaggacactccgtgggcgagctgacagcagcgtgtctcgccggggtagttgatcccgggacggccgtcactcttgcacgacggcgtggactggccatggcgcgggcctgcgctctccacccgaccaccatggcggccatcattggtgacaatccggatgacgtcctccggcggctctcggaactgggactcacggctgccaacatcaacggaggcggacagattgttgcggccggctccaccgacgcgatcgcggaactggtggcgacccctcccaacgggaccgcagtcaagccgttgcgagttgctggcgcctttcacaccaagtacatgacacctgcgcaggacgctttcgcccaagctgctcaggacgtcaccttctccgacccgcagcacccgatcatctccaacctcgacgggcaggagatccggtccggcaatgacctgcgtgaacggctgattgcccaggtgaccgcgccagttcgatgggatctctgcatccagcagatcgcggatcgtcagccggaactcgccctatcggcccctccggggaaggtgcaggcgtcgctcttgtctcggcagatcccggacctcgcgacggtctgcatcaccacaccacgggaggcagcccaggctgcacagcggatcgaccagtccgtatccgtccttcagggggcatgatgctcatccccgagtacttcctcacagcctgttcggaccatgctgagcgcctggcgatcatcacccacaatgacgttgtgacgtgggccgaactggcgactcgcgtcgacggttttcggcgctggctgcgggaccatggcgtgcaccgccaggacagggtcgttctccagacgccaagcaccgtaggcacggtagccctcatgtgggcctgcctgctcgacggcgtgacgatggtcccggtgcaccaggacctcactgcctcccaggtgcagcaagtcatcgacgactgccgtccagctctggtgtgtggcagcccggacctcgtccaactcctcaactcccccggaatgaagacaagcacacctccaacgcggccggagtcaacgagtattctgccgtccttgtcccgggtcagccccgatgaccttgcgatgctcatctatacgtccggcacgacgggtctcccgaaggggatcatgtgtccccaccggcaggtcgccaccgccgcacggatcgtccatgactgtctcgggtaccgcacggacgacgtcattctctgtcgcctgccgttgtccttcgactacgggctctatcagattctgatgtctgccatctccggtagcgcggttgtcctgcgggacggaggcgcgcaggaccgcaacctggtgcgcgacatcgcccgtcacggcgtcactgtcgttccagtcgtgccgtccatggcgtcaatgctcatcaccctgcagcgtcgtgatcagttgccgaccatcgtcagactgttcacgaataccggggcgcgtctggcacccgagaccgcgaaccagttgctcgcaagcttccccggctcccgctatgcgtcgatgtatggcatgacggagtgcaagcgcatctccatccttccggtggaggagtacgagacgcatccggacagcgtgggaagagctctgcccagcactcacgtcgagatcgttgacgctcagggagttccggttccggcgggcgagcacggggagatcacggtgtccggcccgaccgtgatgaacggctactggcaggtgccgaacagtcccagtggacgattccgacccagcggccacggcctcactctgttcaccggtgatcgcggctggatggatgaggagggacgtctctacctcctcgggcgcgacgacgagatcgtcaagcatcacggcatccgaatcagcctgcaggagatcgagatagccgccgaagccgcgccgggcgtcgacgcagtcatcgctctcaagccggcctccgactcggcccccattgaaatcgcctactgcggcagcacgagtcccgagaacctggcccgccatctcgaaaccgtcctggaccgggcgcgacgaccccaattcatccaccaactccagcagatccccctgacccgtaacgggaaaccaaaccggtcagcagccgccgaggccatccgctcaagggcgtgacggcgaaggccaacacccacagacgaaaggaaaccaccatgacccaggccgagttcaaccagttcatcgagtccacctgctccgcgacgatcgtggatcccgaccgtcctttggtcgatcagggcatcgactccctcggaatgctcaccctcatggtcgctatcgaggacagcctcggcatcgaactggatcccgagtccctcgccgacggtaggggttccacgccctccggtcttctgtcccttgtcgagcagctgaaagcgacggtgtgacgacatgacgacgatggttccttgccgccgtgtggagatgccgcaactgttcgaccacatccccggaagcatctctctctcaggagggctgcccgatctgagcgtgctcccgagcaatcagatcgccgaactgacgtcccggatcatgcgtctcggctcaagaatcctcctgcaatactccaccccttcggtctcgtcctccttggtgccggccatcctggacctggcggaacgaacatgcatgtcaccggatccgcggaatctgatcccgaccgcgggttcccaactgggcctggccatggtgatcaatgcctttgacggcgatgagatcatctgtgactgcgccacctatcccggggcgctggccgccttcgcctctgccggcgtggaaacaacgggggtggccagtgacgaggaggggctcaacccagacgcgctcgctcacgccgtcgcagagggtcgggccaatggccgccgcatcgcagccgtctacaccacgcccaccttccagaatcccaccggctccgtacagtccgagaaccgccgtgcggccctgctcaaggtgtgtgctgacaatgacctcctcctcatcgaggacgatccgtacggcatgctgtccttcgacgggcagacgtggccagctctgaagtccatggacccacagcgcgtcatctacctgggcaccttctcgaaggtgttcgcaccgggcgtccgttccggctggatcgatccgcccgccaatcttgtcgagaaactccgcgctgtgtgcgagatcatgacactctcgccatcagccctcaaccaagcgatcatcggcgagtaccaccgtcgtcacggatgggacgaactgttggagggctatcgcgcctcctaccgcgaccgagcccgtctcctcatcggggctctcgaggctgaactggcaagaacgaattgcactggcacgtggacctggcgtgaaccacggggcggcttctacctgtggttggagaacgtcgccagcaccagcggtatcgacgttgcgcgtcgcgccgccgacaacggagtggccgtggtgcccgggaaacacttcgacgcagccggacacgattcgccgagcctgcgggtgtcgttcagcaattcacgcccggctgatctggtcgaaggagctcgtcgtctcgcccgtgcactggtgggagaggacgttcagaaatgactctcgcgacacgcaccgccaccgacaccctgcagcagaccttgccctggggcacccacgaacgtctcgtcttcgggcgggcgctcctgcgcagcaccggcttcccagccgaaggcttggccctgctcgactccgacgacatcctccccctcctcgactcctttcttgccggggacatcgacagaactcacttcgagaaggaatacaccagtcgcgaggagtccggcgcaagggcgctcatcaacgtcttgaaggacgatgcagtatcgcgcgccatcgcatggcagaaccccaccgcgtggaggtccttcgaatccctgtcgtccacgagcggaatcaatgcttcgactcggcgcaaggtacgccaactcgccctctactggcaacgttactgttccaaggctgagaccattggatacttcggcccgttcgcctgggccgaagtcgacccggaggcctctgcggtcgaattcatctcctccgaccatctgatcgaccgttcccacgtcgcaatggaggcgtgggcggtcattgagatcgggaaagccctggcatcacgggccgaccttcagtggtggatgccaccaatcctgtcccccgccgtcgacctcaacatggagagaggcaccgtgacggtggctggacaccagccacgacgggtccgggaggacgaggcacgagttctcttcctgaccgacggcacccgtcccgccgcccagatcgccaagagcctcgacatggagcccgagcggttgcgcaggatcctcgtggcccatgaacgtcgtcacaccgtgatctgggacgccaacatccctgtctcagtgcacgcgtgggacatcctgcacgaacgcattgcccagatcggagacgctgggctgcgagatgaggccactgctgttctcacgaggttcgacgagcttctggaggtcatccgcaacattcccgacgcccggtccctgacggaggcgacggaatccctgtcccgtcttttcgaaaccgtgacaggaacctcttcgaacagacgtgcgggccaggcatatgcagcccgcagcctgtgctacctggactgcacccgcgccggaaccgccaaggttgggacccggcttctcgaagccctcgacgcccccctcaacctcgtcctacaatccgctgactggttcgcggcgaccttggcaaaggaatacaccaccgaaatcacggacctcgcaaatcgaaagcagcgggcctcccaccagccactgaccatggctgatgtctggccgtccacgatgtcgctgttctggggggactcaccgtccccactgcagcgagccgtgaccgaactgtcacggcggtggagcagagtcctcgaggggctgcagccagtcgacggtcgcatcgacacgacatcgtccgctctctcgggcgccgtggacgagcagttccccgtgtgcaccccgattccagaactgtcagtgcacagcccggacctccaggtcatcacctcgagcactagcaacatcgcctccggacgagtcactgcagtcatgggtgagctacatgcctgtctgagcagtctcgacatgccgttgctcgagtggtcgctgccccatggttccattcgcgatcgcatcaacaccgcgctcaacctgcgacgtctggttcccttgttccccgagacatggaggcgcaacaccggccgcatggttccagcgacggtcggagtgggggatcgcgcaatcgggttcactcggacggccgatcaagaccgtgcgaacacatggtcgatgtcggcactgctgttcgagcagaccgaggacggactcatgatccgtgatcccgatggcaggctctggaccatcgcacaagcgtggagcgtgcccatctccatggtcgccgccgatgcgttcaagatcgggctgcccggctcaccagcccctcggctcaccattgacaatctcgtcgtgttccgtcgtacctggaggtttcccgctggctccatcgacatcatgcacggttcagccgccgagaaacacgctcggctgagggagtggcaggtcacgaatcaccttcctgaccacctcttcgtcaagttcccctccgaacccaagccgatctacttctccttcgagtcccccgccatggccacggtcttcacgcgatcactgcagcgcgacgcccgagagaatccagacagtctcgtgacgatgtccgaagcactgcccgagcctcaatcctcatggctgcacgacacccggagccaccactacgtccacgaattccggctgcaactgaccaaggagcgacatgacgaccacagttgagacacatcccgaaacacgtggcacaaccgcgacatccatctccaatctgatcggtcacacccctctcgtaagaatggaccatctgttcgacggcctccccttcgaggtgtacggcaagctcgagaagctcaatcctggcggaagcatcaaggatcgagcagcacaatccatgatcgaacgggcaattcgacggggtgagatcgtcccgggccgtacgaccgtcatcgagtccagttcgggaaatctcggcatcgccgtggcgatgctgtgccaggagcacggcctgaatttcatctgcgtaaccgatgccaaggccacgccaacgaacattcgactcatcgaagcgttcggggccactgttgaggtgatcgaagaacctcatcccgagagtggcgaattcctccccatgaggctcaagagggtaagagaactgctgtcagagattccagatgcatggtggccgaatcagtacgggaaccccgacaatccggcggctcacgagcggactgtccgcgagatcatcgaggcaatcccgcgggttgacacgattgtctgcgcgaccggctcgtgcggaacccttcgcggctgccacgaagcattgcgaaagctgtccccacgcacccgactcgtcgccgtggacgccaagggcagcgccatcttcgacgaggcaggagcaccccatccccgctgtgtcccgggacacggtgcgtcagtgcgaccgccgctgtggcgcgcggggctcgccgaccaactggttctggtctccgacgcggactgcgtcgtgggatgccaggaggccctgcgcaccgaggctcttctcctcggcggatcctcgggagcaattctgacggccattcaccgagtgtctcccacgattcccgctggttccaccgtggtgacgatcctccccgacggcggcgagcgctacatcgacaccatctacagccgctcgtgggtcgactcacacatccccgggctgccctctctcgccgactggggggctcccaaccccgccaattcgtatgacctgaacagaagtgcctcatgaagctctacaccagagagaccgtcgaaactgcgcttgtcgggcgtcatggccaggttctcagtgccgtacagagtgcatacatgctgcattcgacgggagagacatcgctgccattctcaaccttcctccgcccggccgggtatccgaacgatcggatcatcgcacttcccgcccacatcggaggcgacttcgacatagccggtatcaagtggatctcatccttcccggaaaacctcgaccggggccagcaacgagcttcctccgtactcatcctcaatagtctggagacgggatacccgaccgccctgctggagtccagtcagatttcagcaacgcgaacggcagcatcagccgccctggccagcgccaccctccatggctccgaagaccatgtcagcacgattggcatcatcggctgcgggacaatcaatcttgcaacgatcgactacctcttccacgtgcacccccagatcaacgaggtcctctccttcgatctgaggcgggagcgggcccatgagttctcgcacctcgtcaaggcttcgcacccagaggcccgggtccgtgtcgccaaggagcccgacgagattctggccgcaagcaacaccatcgcgatcgccacgaccgactcgagtcattggttggaccttccgccgtggcacgggccggggcaccaagtcgtcctgcacacgtcgctgcgagacctgtcagtgccctcgatcctggcagcggccaacgtcgttgacgatcctgatcacgtctgccgtgaagcgacgtccttggatctggcaactcagcagaccggcaaccgggacttcatcacggggagaatcggagacctccttcttggcgcgccgctgtcctcaagtcctgactcccgtgtcattttctcacccttcgggctcggcatcctcgacctcgcagtcgcctccgtcgtcattgctgccgcctcctcttcagcagtcgagatcaatgggttcgaccccgggaaacacgccacaagcatgattgaggtgaatcgatgaccaccacacagatcaacgacaacacggccgttctgcgcgacgtattccccgccggctccgtcgcattcgtgagcggtgcctcacgcggaattggcgctgcctgcgcgacagcccttgcggccgcgggatgcaacctcgccatcacttatcgaaggaaggagaacgaggcggcacaaatcgccgaatccattgaagccatcgggcgccagtgcatcacaatgcagatggacgtaaccgatgagaaccaagtgaccagagccttccgcatcattcgccagcattacggacgcctggacgccgcggtcttgaactcgggaatcaccagtgacgggcatcttgcaacaatgagccgctccaagtggagctcggtgatcgacacgaatctgaccggaaccttcctctgcacgcgcgaggcgaccaaggccatgtactcgtccggtggctcgatcgtcatggtcgcgtccaccagtggagttgcagggcgaccgggccaggccaactacgcagccagcaagggcggaatcgttgccatgatgaagacgctggccccggaggttgcggcaaagaacgtccgggtgaatgcggtggcacccggcttcattcagaccgacatggtggcggccgttccaaaagcggcactcgcccaggcaatccaacacatccccatgggccgtcttggcctggcacaggaggttgcgtcagccgttaccttcctggcctccccgctcgccgcctacatcacagggaagaccctcactatcgatggcggaatgatcaacggctgaccccaggacccggacacccccagtaccgagaaaggaacaacaatgaccgagatcacccacactgccaacagcatccgaacccgcgccgaggaacgttccaacaaagcttggcgcctgaaggaggagatcatctccaagctcggtctcgagaccaagccagaatatgtctcggacaaccaaccgctcttcggacgtggccttgagatggattcccttgacactctcgaagtcgtcgtcgccgtcaacaatgagttcggagtctcggtcaacgacgacgacgtacaggcgttcggctcgatcaatgccatggtcgatttcatcgaggtgaacgagaagtgagttctcttgcgctcgaggcgccacccaaggacgcccgtaagaaattcgcctacgacagcgatgccatcaagacgatgctcccacatcgttggccgatgctcatgattgatcgcgcctacgacgtcgtcccagggaaatcgggcaaaggcatcaagtcggtcagcgtcaatgagccgttcttcgccggtcactaccctgaccattccatcatgcccggcgtcatgatcgtcgagtcgatggctcaactcgtggccgtcatctacgtagccgaggccattcagaacaatcccggcatgacgtcgcacgacgcacgttcaagcgttggttatctcggcgcgatccatcagatgaagttccgacgcctcgtcactccgggcgaccaactcaccctccacgcccagctcggcgagaaagtgggggctctgcgcgaggtttccgtgagagcactcaatggccgggatgtcgtcgcccagggggaactcgtcgtcaccgagcggtgacacccagccacacacgagaaggaagtcccatgatcgttcgcccctacaggccacgtgatgcggaagcgatcgtacatctctacaacagccattccgactcccccaatccagtgtcgggagggattgttgaggaggagttccagagggagctcgaagaacgtggttcgacagtgttcctagtggccgaggaggccggatccattgtcggcacattcgggatgttccgcacgaatggccgacacaccatggccgatgatgaagtcttcgccgacatgttctatgtcaccccgtcacatcgactctcgacagttccgggacagctaatcactgaagccatcagcgagtgcttcatccagggcatcaacgtgatccgcctcaccgtgaaccccgcgaacatctccgcgctcaaggtttacagaaaagtcggttgtgcctgtctcggggccaccgatgcaggcgaggacgggaacattgagctgtacaacttcatccctctggttcttagggcaaccatcaccaaactcgaccacgattgtattcgagccctggcggacatgacttcgttcgcctgcatcaccgagggacgtccacttgatctgtcccacgacttcatcgtggacgctggacggaagatcgtctcccacagcatccagatcgggcgttcaaccatccacgccatggtcgacacgggctcgaggaccattgtggaggccaccctcgacaaccgcgactgggatgctcctcgccagatcgtcgcccccaccccctgtcagaaccggcccgaggaacagcgaggcaaccctgtccggctggtgcacaagaagcttgaggtcaccttcaacgaaggagtcattgagatcagtacgactggccactggggcccggtcctcgcaatgtcctggccctcctccgtctcgcaccgcgctcacgggtggcgacagggccccgccaagtcgtatcgatgcgagcttctcgagaattgcctcgtcctggatgacgaaggaggagtgaaatgcaccatcagcctcaatgattgccaagtcgcgatccggatggatggtgccccaaaaacggaattgagaatgtaccagtggtgcagcctgcgccagggctatctgacggctgacaccggcatcacgagcttcaaccgggcatccagtgggctcggagtcgccgtccgggactcgtccgagattgtcgccgcgggccttcccgtcatccctgacacaccgatcacatggagtgagggtgacatcacggttcagctcgatccctgcggccgcgcctccctgatccactcgaccctggtggaccgaagaatccacttggacgagtctggctcggcaagtctcaccatgaccgtgtttggtgactcccagccccatcgtgccgacaccgtcgagctgcctcccctcgcggcaggcaccgacaggatcgtcctcaagccggctgccggaggcgtgaccacatggcgcttgggcgccaccaaggtgctcaagtcaccgtggccacacgcccgcgcgctcgggcccaatccgatctggcgagccggcctgtgggtcagtcacgagccggatcgccacgaccgtcgccaaggaatggggtggggtcccgatcatcgcagttggaccctgtcggaagacaccatgaccagtactgacgggacactctcctggcgcttcagcggctcccccgacaccggctggacggtcgacgtcacgacgagcaacacgcacggggagaccgtcgtctggctcaccccggactgcccggcgggcgagaggatccgcacgtctgatcatgccgtgacgaccatgcttgacatctcgaagccatggcagcgctggaccacccgatgcgcaattcctctcagacacgggaagtggttcctcatcgagcctgatcatgacctcactgattcccccgaaatcctcatgcgctctgttcacggggtcctgctcgtcggctgtgtcggacgagcccactccggatccgcttcctggcgctttgccatcacgtcagaactccccacctccaacccaagaagaaacgactacacctcagccgcctgaacccaaccagttggaacacccactacagaagaaatggagcaccaccatgtccatcactgagcagtacaagacccttcgcacctcggtcggcctccacacgcctaccggtcccctggtccgtatcaccggtgatgatcgtctcgagtttctcgacaccttcctgtcccgcgcctcggacttcgtggaccccgacaccactcgggagtgcctcgctctcaccgaggacggccttccgctgacgatcttcctccacatcgagcgcgaggaggagtcatggctccttccccgcaccgccatcgatgcggcgaccctcgccacgtacctcggcaacctcgagaccgatggtgacctgtcaatcgagattgctccagagggttggggagctgtcgctgtcgaggggccgctgtcgtggcagatcgccgaaaaccttctcgacttcgacgtggctggcctcgttcttcacgccgtcacggacgtcgtcgttcccggggcccccgagggatcgaaggcatggctcgcccgggtcggaaccactggggagtacggctacctgctcgtctccaacgttcccgacctcgcccgcacttatctcctcagccgcgccacggagctgggcggtcaggcagtcgacgccgatgctctcgcacgagtccaggccgaggccgggatgccctattacgcgatgggcgtgtgccacctcgatgtcgccgggggtgacctcgcctggctcgtggactggcagcgcatcggcgagttccaaggatccgagaatctgcccacacccgtccgagaccagcgccgactggccgccatcgccctgcccaccggcaaccgcccggaagctggtcagaccgtcgctgccggggatgaggagattggagtggtggtgtacgtcaccccgtccgccaatcccgatgaggaactcgcgttcgcacttctggatgctcctttctggactcccacccttccgttgaccgtcggtgcccacgacgggaccacggtcaccctgccccgcgtcgtggcagcctccagcctcaacaagctggggtgacagcgatgacgatcactgctgagaacgccaccacccgcagcgacattgcccggagcattgcggtgaccggcgtgggactggtcacggcacagggtgaccataccgacgagtgctggaccgaacttgtcgatggggtttgcggaatcaccatgaacgtcacgttcgatgactctggcaccacgattccgtgtgctggcgtggctcccattccgaactctgattcgatcgaccgctgttacctgctcggcgtccatgccatgcgtgaagctctcgagatgagtggcatcgacctggactccgtgggtcgtgatcgcatcggactcgtggtgggctcaagcctcggcgcgatgcccaccttggaggcggctcatcgccgggccattgagaccggcgtgctcgatgccggattggcggcagactcccagctcccctgcgtcgccgaccacctcgccgctgagttcgacatccgtggaccccgcgtcgtgacatcgaatgcgtgtgccgctggtgccgtggcgatcggctacgccgcagaactcctctggtccgacgatgtggacctggtcgtctgtggcggtgtcgatccactggcccagatctctgccaatgggttcacgtgcctgggagctctcgacaatctcccatgcagcccgatggccggttcctccggtctgactctgggcgagggagccgggttcatggtcctcgagagaacagatgcggcggctgccagaggccaggaggtgatggccgaaatcgccggctacggcacaagttgtgatggttaccaccagactgccccggacccgggtggcaatggcgcccgcagctcaatggaggccgccctgcgctcagctcatctcaagccgtccgacgtcagctacgtcaatctccacggcaccggtactccgaccaacgacgccgtcgagccgaaggcactccggtcattgttcaagtccgatgaccttccccctgtcagttcggtgaagggcgccatcggtcacactctcggcgctgctggcgccatcgaggccgtgtgctcgatcaaggccatccacgagggggtcctgccgccaaccgtcaacaaccgcgggcaggcttcccgaactggtctcgacatcgtgccggagtgcgcacgcaaggccgctcccgacgtggtcatctccaactccttcgccttcgggggcaacaacgcatcagtggtcatcaccgcacctcgaggaggcgttcactgtaccgccccggcgcagcttcgcgaggtcggaatctcaggaatggcagctctggcgggaaaggccgccaactcggaggagcttctttcggccctgtcagaagattgtccaatctggatggccgatgagaagacctgggaaggggatgctgtccaaaccggccatgtggacatcaagcgcctgtcccgcacaatcaacccgtccaaggttcgtcggatggaccccttgggaatcatctccagcgcggtggtgactgatctgtatgcccgacacgggaagctgagccgcaaggatgccgaaagcacgggaatcatcttcgcaaccggctacggtcctgtgacggcggtgacgcagttcaatgacgggatcatccgccacggttccgagggtgccaacgccctggtgttcccgaacaccgtggtcaacgcagccgcaggccacctcgcgatgctgaatcgctaccgtggttacacggccaccttggcatgcggtggaaccagttcactcatggcgctgcttctcgctgctcgcgtcgttggccgcggcgctgcggatcgcatcatggtcgttatcgctgacgagtttcccagcattgccgtccaggccgtcgcaaagcttcctggctaccgacacagggttgatggttccggagccgtgctctcggaaggcgcggtatgcgtcctggtggaggccgtcgaagtcgccgaagcacgcggtaccgcccccatggcgctgctacgcggcttcggatcccgtggagagtccgtgggagtcggtcacaccgcatccgatggacgggcttgggccaaggccatggccgctgcactgggccaggccggcctgactgcctccgacgtgtcgaccgtcgtggcggcatcaagcggacatcctcgcgtcgaccgagccgagcaggcggccaggcggatcgtcggactgtccgcaaccgctacgaccttcccaaaggcgattgtcggagaaacacacggatcggctgccgggatcgggctgttcggtgccctgtgcggttcgaggtcagccgcgcaccagaacatccttgtcaacgccttttcccacggcggtggttatgcctcgatggtggtggagtcactgtgaccacgacgcttctgccacgggttgcccagccgggaccgggcgtcagccatgtcgacaccgaccgtcccatcgagtgcatcatcacccaccacccccacatgccgcgtgatcgcggaggccacgccacctccgtgtcaggcaggtacttgctgcgccaagccgcagaactcatgctcggcacggatcctgcgcattgccccgtcgtcgacccttcgcggcgctggtactggcccggaatcaatcttcacggttctgtctcccatgtcccgggctggagcctgacgacgctgagcaccggcggccacatcggggcagacatccaggacttccgggagcgtcccggcgcaatggcattcatcggtgacctggtcaagctgtcgcgatcggcgtcactccgagaattcgcggagtgcgaggccgtcgtcaaggtgtccgaattgactaaggagacgttcgggcacgtgcgactgcccgaatggacacccggatggcgccacgttttcgaggactactgggtctggagtctcgagatgcacgggatgggagtcatcgcactcgcatccgatctcccccgagccattcgctggtggcggtgcgacgccgatgcccgtggccgtctccaggctctccgacccataagcagtcttggaccaggaaggccgtcatgagccggtactcacgtcgaatctcaggcatcgaacgcggctatctcaacgccgcaacccggggcccgcaccccaccatccacacgatgatcgacttcgagggccgcgtccccgccgactgttggcggcacgcatccacgattgcgtcggccgccaaccctggcatgacagtggtccggaggtcgggccgatggacatccgatccagcgggctgtccggttgtgttccacgactggaccgcggaccccaacgacgttgccgacttccacgctgacatggatctcgtgacgggaccatcgtccacgctccacgttttcgagggggcggaacgcacccgaatcaccttggcagcaagccatgccgtgaccgatgggcggggcatcgaacgatttctcgtcgacctgcttgcagcgttggacgagcgtgaacccattggaagccccgacaccctgaccgatgtcgatatcaaacgatccttggagaacagcatcaagccccgacgccacctggccgctgtgcccgccgatgtcctttctccactgggggggaggaagaaccaacgtatatgggcctccaggacgtggcacagtgccccgggagccatgagcggaagaatcgctgccgctgtggccgagatgatcgaccacgccgcaatgatcatcatcccggttgacatccggcggcacgtcccagaggtccgatccacagcaaacctaagtgcccaactgccagtgatcatcaccccgaaccagcgctggcaaagcatccatgggcatctgctcacggaccttgctcgccatcgagaccttgcgatcatcagtgaggatttccgccacaacaatccgttcgcatcgaccttggaggaaagccaggccatcggcctcgatggtgtctatccctgtgccgcaatcatctccgaccacgggaagctcgacctttcaaggttccagaccttggaactcaccccggtctcgatgcgaagcctcccgatgctcgttccctactccgcaatgttcatcagcagttgcaccgtcggcgagaccaccactgtcaccatcgctcatcgcgctgatgacgatcccgattccataaacaccttcttccaccacatcgaatcccagatgtccatctgagccacgtcgtccctggagagcaaacatgaccacccaagatgtcatcaccccgccgcgccccgtcacctcccatgccacggcgaccaggtccgaggctccaccgcgaagcgtcatcagagccatggccatctcgatggtcgcgaccctcatggtcatgctcgacacgaccgtcgtgaacgtgtccttgagcgcgaccaccgcccgcttcgggagcatgggcagcgtgcagtgggtcctcacaagttacctacttgcactgtgcgcgacgatgacggcctccgcctgggtcatcgaccgccttggtccacggctcaccttcatcgcctcaatgaccatgttcctcatcggctcggtgatgtgtgcactgagcgattcagtgtggcaactcgtcactggcaggaccatctccggtgccggagctgggatccttgttccgacagcatccgtcctgcttatccgtggcatcccacgcgaacaacttggcagggtgcaggcactgaatgggagtgtccagttgatcgctcccctgatcggcccgactgtgggcggtctcctcgttgacaggtgcgggggctggccggccatctactgggcgaacgtccccgtagctcttgttcttctgattgaggccgtccgcgtcgatccggacgaaccacacaccgctaagcgccgcctcgatgctctcggcctggtctgtggcagcaccgcgatcgtgctgacagtgcttggtgtctcactcttcggcaggacgtcgcgaaacaccaccttcctgcttacgatcggcgcgcttgcagtcctcgcatgggcgttcttcatcacccacatccgaagggctaccaaccctctgcttgacgtttccctgtatcagaaccctgtctattcatggtccagcttcaacgtagcggtgcttggtttcggtctctacgcccccatggtcgtcatgcccctctatctcgaggcgacgcgccacctcactgccgtccacactggtctggtgatgtcagtggccggcgtcggcgtcattatggccggaatcctgtgcacgaagatcatgggccggatcggtggaggcctcacgatgacagttggcataactctgagcatcatcgccactctgcccctggtccggctgacgaaccacacctcctacatactcctggcagtctgcttggccttgcgtggagcaggaatcagcctgacaatcgtcccagccatgacacgggccttcgagtccatcaagaggacggccatggcggacgcctctgcacagctcaacctgttgcagcgaatcggcgggacaattgcgacagcagtcatcatcgcagttatccaccacgaggccatgctcacccgcggactctcccccacagtgttctcgcacgccaacgtgtggatcctcaccgcgaccgccgtcacccttctgccggccttcgcgcttgcgaaggccgaaagacaacagcaggatctctgagcaccgaggagtactccctcgtagaccctcctctgatctaattgggttcgttccaagtgtgtatctcactccggggagccccgattgctgaaccacatcccgttcaccctggcgagtccctcgtggtacgacgtcccctgggcgcccggatctccgtatctcacaggagatatctcggtcctgccagcggactcgccaaggtggacgacgaccatccggggtccttggcaaatccacatgccacctcgtccgacccttccagaggtggggtggaaagtgcatgtgtctgccaagccatcggaattggaatcggttgcctcagtcgtagcactgtggtgcgtacgccacagcgtccccttcaaagtacttcgcacccgaggtctcgttcacgcgagtcaagtcaagtatgcggaccgaagtcagagcggcaaggtctgcacctgctaccccgacggcgagagccttgagcacttctgctccggtcttgccgagctgcttcagaacgtcgattcacctccggtgtccggcgagctgcgagtcggatcctcccctctgtggttgcgtcacgggagtttccgagaggcatgggcggtgtcatccacaggagtaccgttcccggtctacccgggaacaacacatcctgatcgtcgaggccccgcgcccgcagaatccgatcacgacacgccgtggatccggaggctccgtcggacgaatcgccccagcacggttcttcccatcgacgatgtcagactcctccaccaatcaaatgctggcggcgtgtatcaggcaacatggagagacggcacatcggtagtcgtcaaggaggcccggcacctgtccggacttgatgcggcgggtgtcgacgcccgagtgcggctgcgtcacgagtacgaggccctgagaagactggacccctatcgggccgctccccatcccattgatctcattgagaccgaggacggctcgttcctgatcatggaattccttgacggaatgacagtccaccaggagatgtcgaggttccatcctctgattggtaggcgacctcatcggctatcgatgaccgatttttcacgctggtgccgagaggtcgaagatcgcttgaggaatgtcacgagggtcatggccgggtgcggaatcgttcacggggatcttcatcccgcgaatctgatacatgtcggccatgaggttttggttactgactttgaatcctgctcaatcgacggggtcgccgtctcgtcagggatcgccgctccctggttccagtcggacgacacgattcccgatccggcgacgactgacgatctccacactcttctcgtggatccgacttgcggccccgcgcttgtcctccatccaaatcttcgcgcgctcatcagccaggccgcagtcgaggacatgatgggaaatccgactggtttaccacatgcctggaacctcgaggacgtgacaagcgaactcgccaaggggatccgggcatcagccactcccgcacgagccgaccgcctctttccctcagacccctacctgttcgggcatccaggttcagaattcggcctgatgcatggcgccgccggaatcatggctgctcttgccgtgactgggtacggtgttgacgcgaatcacgtgacctggatgaaggaccgcttggccacccgcccgaccctgctgccggggttggccaacggaatcgagggaattgccctgggtctctccctgtgcggtcagaacgacatggctgcatccctgctccaccagtccggaattctcacgatcacaacgaacggatcgactgacctcaccctcggtactggtatggcgggccgagcgtgcgcgctgcagtccctctcacaacgactgtcatcgaaatctctcgcccacgctgcatataccctctgggaacaactcgccgtggctgtgcggaacactgatgtggccttgccgaacggcctgttctccggttgggaggggatcgggctctccctgcttgcctctcccctgccggatcgtcatgatctcgcccgccactcactccgactggccctggccacgacaacgattgttgacggtgcgctcttctcaggcgagggacagatccgatggccatatctggggcgtggtcccgcggcatgtggcccgctcgccgccaggcttgatgatgaccagacggccaaggccgtggcacagacctgtcgttgtcccctgactgagtcatccggtctccacaatggccgcgcaggtctcctactcgtcctccgccagctcgtgggagaccaagacgacgccgttcgccgccacctcatgagactgtcgtggtcgatggaccgtcgcgaggaaggcacattgctgctgggtgatcatggcctgcgtttctcatccgatctcgcgacggggtcagccggcgccctcctcgccctgagcagggacccatggcggaacatgacacgaatgctcggaatatgcgatgacacctgtcatggcccactagtgacagtttgatctagcgccgatagttcacaactgaaagactccaaacatcgaggaaaacatgctgagccaaaacgccttggcaggcgtggctcgtttcaccacgatgaacaccaggagacagaatgtccgttgaggccatgcaatccatcgagatggacgaggaaaacagcgccagccagacagtttgcgcttgttacagcttcttctcgtggtcaggatgctgcgtagtctcccaagcggtggaagcatcttgatcgtgtgagacgccgtcgactaccctgtcccccgtggtacgcacacgccccgtcctggacagtcccggaagaccgctcatcgcctccggagtcgtcctggcggtcctgctcatcatcgcggtgatgacgatggtgcttcagcgcgaccccactctcacccccggacgccgcattctcggtatcgtcctgtccacggtccaggccgtcggattcatgtggctgcagacccgcatggttcgtcacggcaagggttcgcgcaacatgcgtgcgacccttggaagggtcggtttctgggccacgtggggactcgtcgcagtgggagtcgtcaatctgtggctgaccaactcgtggaccctcttcggggcctccgtcgccacgcccctccttctcctgccaggggtgtggagtgtggtggccaccctcgtgaccctgatcgtcggtttctccgacctcgtggtcacccacacctcgccactgacctcagccacggtcgtgctggtgaccatcgcggtgtcggtgaacctctacgcattcacgaagctgtcgacggcactcgttgaactccgctcctcccaggaggagatcgcccggctgcgcgtggacgccgagcgtcaccggatatcgcgggacctccacgacatcatcggtcgcaccctggtcgccacgtcgatgcgccagcaggcggccctccacctcgtcgaccgcgacccgcaacgggccaaggaacagctcgacgccgcccatgacgcaatcaccgaggggcagcaccagttgcgttccatcatccaggccgagatgagcaccagcctccccgacgagatcagcgacgccacattcctgtgcgaccgactccacatcgacttccgcatggatgaccgcggcagaccgcacaaacccttcgactcggcggcggcggcggccctgcgcgagggaatcacgaacatgctcaagcacagcgcggcgggctactgccacgtcgccatctccccggacctcctgaccgtcaccaacgacggttgtccgcaatcacctcgcccctccaccacaccgggcaccggaatcgaccatctccggtcccagatcgaggcgctcggtgggtcggtgacgacgtcgcggccctcgcggggcaccttccggctccgctgctccttcccgacccggggggcgtccacgaccacacccgcgaccgaaggaggacgatgacgacgagaatcctcctcgccgaggacatcaaactggtggcagaggccttcgaggcactgctctcggtggaaccggagttcgaggtcgtcgcacgggtggcacgcggcgacgacctggtcacatccgccacccgcctgttccccgacgtgatcctggccgacatcgacatgcccgggatgaccggcatcgaggccacccgaatgcttcgcgacaagggataccgcggcagaatcatcctgctcaccgccctgccgggaagcgggcacctgcacgccgcgatggctgccggagccgacgggtacctgctcaagtcgatcaccgcgccctccctcatcaacgccatccgggcggtgtgcaacggccagtcggccatcgacccgaacgtcgccgcggtcgccatgcgcaagggaccctcgcccctcaacgaccgggaaaccgagattctgcgcctagtcgccgacggttcctccaccgcgcagatcgcctcgcggctgtacctcagcaagggcaccgtcaggaactacctgtcgacggcgatgtcgaagctcgacgccgactcacgcacagcggcggtcacgcgggcacgcgaggagggctggctgtagcaggcgacccgctcagcccaccgcccctcagcccaccgcccctcagcccgccgactcctgacgcacggcctcctcgaccgcccggctgagcagggacccggccctgaccatcgacgtctccgggtccggctcgaggtcggacaacgcgatgatccggtcgaacgcggaccgtttctcctcgggcaggtcacagcgtccgcacaccgcccagacgggcaccccggcgtcccgggcgatcttgcggatggtgtcgagaagcttgccgagcagggtctgctggtccagccgcccctcccccgtgacgacgagactggaggcggagatccgcgacaccgcgcgggaccatcccaggacgaccgccgcgcccgggcggtacctggtccccaggcacatcagcgcccagccgacccggctgggcggctgcgaaccccctggccaccgcccggcaggcctttcccgaactcagcgaccccttgaaggagtcgacggcaacgatgaccggcgcattcggatcaggacgcatgggatcagcatgtcacgtcgatacggagcagtcgcgccgcctacccctagactcgggggcatggtcaaccgagtctacctgtccctgagcgttctcgccctcgtgctgtgggtggtcgcctaccgtcacatgccgggctgggccgcgggcatcaccctggtgggcatcgtcgtgctgtcgctgtggtgcgagtggtcgcgggtgcgcaccctggccaggatcggcaagtcccgccagcagggcccccgctcctcccgaggacgcaacctgtcgtgagcaatacgattcccgcagccctccaccccggccctgacgaggcc

SEQ ID NO: 433 - DNA, 26636 bp, Propionibacterium acnes
  source 1..26636: mol_type = genomic DNA
ccttgtggacaccacgtcatccacatgacttgtgtcacatgattcccggaccatcatcaagcagatgctcacccaactgtaatgatttctgttctgaatctggacatgctctgacctgcattcaatgatcaattccgtgcgatattccacaacgcacggagaggtcgcagacaatgacaacagaaagcatccccacgcggctgctcgtgtggcacgagcagaccgatccgaccaagctcctcaggatcaccgacgcgatcaggaggggggatccccttccccccatcgaggccatggcgatcggccacaaattcctcgtcctcgacggtgcgcaccgggcccaagcccaccagtactgccatcgatctgagatccgagcccgcctccacaacctccccctcagcgcggaagtaccaggctggagccactccataccccgcgatgcagcagcgaaactggctcacctactcctccccgtggacgctctcggtcaggcggaacatcgtcctgcacggggtgcgccgtcaggtggggaccgcttcacaacgaccgcgcgacatctttctcgcctgccaccggatcgcgcgagttgcctacgcgcatggaatcagacctctcggcccggagttctccaacgctccgacgatcgacgccgccaccatgacctggcccccgccgaacgtgggcacgttgtgggccatcgccagcagtctcggacccctgcccgcaactgtgacccggttcgccccgatcctccggcacgacgccatcggggattccgcgatgacacccgtcacctccgccgcgtgacgacccgcgccaattccgccccaccactggatgaggggcagccgcgtggacgatgctcctgttcaggcagggactccatacgagaccaataggaaaatcatgatcaaaaacacaagccctctgaccgtgaaaaatgtctcgaaaacattccgtggctccagcggagaagccatcaaggccgtgcaagacgtgtcattcaccgttgagcgtggtgaggttgtggcattcctcggcccgaacggcgccgggaagtccaccaccatcgacatggctctcggcctcacccgccccgacagcggccagatcgaggtcttcggtactgacccgctcagcgcggcccggtcgggacgctgcaccgcgatgacacagaccggcgggttgctgcccgacctcacgattgggcagaccatggagatcatctcctcgctctatcgtggctcccacatgaatgcctgcatggagcgagcaaggatcacgcatctggccgatcggcaggtgtcgatgtgctcgggaggcgagcgccaacgacttcgcttcgcactggctctgctgcccgatcctgacttcctcatcctcgacgagcccactgcggggatggatgtggaggcgcgccgggacttctgggcagagatccacgaggacacgcgtcgtggtcggacaattctgttcgcaacgcactacctcgacgaggtggacgagttcgccgatcgggtcatcctcatcaaggagggccgcgtcatcgccgacgacacctccgacgcgatccgcaccatgtcggggggttgcaccgttacggcgaccattcccgacttctccctggcacgactgaatctgccgggcacccaactcatcaagcagggcggcgcacgcgttgatctgcaccatcccgattccgatgccctcgcagcgcgagtcatccagctcggcggcaccgacctgcgcgtggtcccccgcagcctcgacgacgccttcctcgctctcacctcaaccaccaaggagtcctgacatgaccgcccaagcgcttcccgcagtcgccactcccaaggcccgccaccgatccgccatctcgctgaagtacttgtggtgcgagatgcgtcgccccttccggcgttcgacgatgctgttcaacctcgccctccccgcagttctgtacctggccctgttccgcaccgtccacaccgccgagctgccggacgggaacttcgcgatgtggatgatgatcggcatcgctgtctacggagcggccactgcgagcaccagctacgcagcctccatctccgtcgacgaggccaacgggtggacccgcaccatccgcctgacgccgttgtcgtcggtcgggtacgtgctggtgaaggtcctctgcgccatggccatcgccctggccccgaccctgctcatcggtctcatcgggctgttgaccggagctcacggcacgctgcgggtctgggtaatcggactgggggcggcttggctcagctcagcaatcttctccgccttcggcctggctctcggactgtccctgcgtcccgaggtcgtcatgcacgtccccggcctggtcatcaccggtctggcgttcctgggcaacgtcttcgtccccctcagcgggacgatgctcaccattggccgctggagccccgcctacggcatcaccgcgctggctcgttacccgctcaccaacggcatcgacatcgggggcggccacgactccctgacggctgccctcatcggcaccttctgctggttcgccggattcgtgttctgggcctcccgtcgatttaccaagagcacgggtcgtcagtgacagattcggccgatctccggaaggagcagtgttatgaccaagcccctcattgcagtggtcaccgcgggccaaggagcgcagaagcctcgcctgctcacgccatggctcaaggtccccggcgtcacggagaagcttgctgcatggtccgctcaggccgatgtggacctcgtcgagctcggtaccagggcgaatgcagaaaccttggcagcgaccgagaatgcgcagccactactggtctgtctcggagtcctcgtctcggatctcctgaccgaccagaacattgtgctcgcaggacactccgtgggcgagctgacagcagcgtgtctcgccggggtagttgatcccgggacggccgtcactcttgcacgacggcgtggactggccatggcgcgggcctgcgctctccacccgaccaccatggcggccatcattggtgacaatccggatgacgtcctccggcggctctcggaactgggactcacggctgccaacatcaacggaggcggacagattgttgcggccggctccaccgacgcgatcgcggaactggtggcgacccctcccaacgggaccgcagtcaagccgttgcgagttgctggcgcctttcacaccaagtacatgacacctgcgcaggacgctttcgcccaagctgctcaggacgtcaccttctccgacccgcagcacccgatcatctccaacctcgacgggcaggagatccggtccggcaatgacctgcgtgaacggctgattgcccaggtgaccgcgccagttcgatgggatctctgcatccagcagatcgcggatcgtcagccggaactcgccctatcggcccctccggggaaggtgcaggcgtcgctcttgtctcggcagatcccggacctcgcgacggtctgcatcaccacaccacgggaggcagcccaggctgcacagcggatcgaccagtccgtatccgtccttcagggggcatgatgctcatccccgagtacttcctcacagcctgttcggaccatgctgagcgcctggcgatcatcacccacaatgacgttgtgacgtgggccgaactggcgactcgcgtcgacggttttcggcgctggctgcgggaccatggcgtgcaccgccaggacagggtcgttctccagacgccaagcaccgtaggcacggtagccctcatgtgggcctgcctgctcgacggcgtgacgatggtcccggtgcaccaggacctcactgcctcccaggtgcagcaagtcatcgacgactgccgtccagctctggtgtgtggcagcccggacctcgtccaactcctcaactcccccggaatgaagacaagcacacctccaacgcggccggagtcaacgagtattctgccgtccttgtcccgggtcagccccgatgaccttgcgatgctcatctatacgtccggcacgacgggtctcccgaaggggatcatgtgtccccaccggcaggtcgccaccgccgcacggatcgtccatgactgtctcgggtaccgcacggacgacgtcattctctgtcgcctgccgttgtccttcgactacgggctctatcagattctgatgtctgccatctccggtagcgcggttgtcctgcgggacggaggcgcgcaggaccgcaacctggtgcgcgacatcgcccgtcacggcgtcactgtcgttccagtcgtgccgtccatggcgtcaatgctcatcaccctgcagcgtcgtgatcagttgccgaccatcgtcagactgttcacgaataccggggcgcgtctggcacccgagaccgcgaaccagttgctcgcaagcttccccggctcccgctatgcgtcgatgtatggcatgacggagtgcaagcgcatctccatccttccggtggaggagtacgagacgcatccggacagcgtgggaagagctctgcccagcactcacgtcgagatcgttgacgctcagggagttccggttccggcgggcgagcacggggagatcacggtgtccggcccgaccgtgatgaacggctactggcaggtgccgaacagtcccagtggacgattccgacccagcggccacggcctcactctgttcaccggtgatcgcggctggatggatgaggagggacgtctctacctcctcgggcgcgacgacgagatcgtcaagcatcacggcatccgaatcagcctgcaggagatcgagatagccgccgaagccgcgccgggcgtcgacgcagtcatcgctctcaagccggcctccgactcggcccccattgaaatcgcctactgcggcagcacgagtcccgagaacctggcccgccatctcgaaaccgtcctggaccgggcgcgacgaccccaattcatccaccaactccagcagatccccctgacccgtaacgggaaaccaaaccggtcagcagccgccgaggccatccgctcaagggcgtgacggcgaaggccaacacccacagacgaaaggaaaccaccatgacccaggccgagttcaaccagttcatcgagtccacctgctccgcgacgatcgtggatcccgaccgtcctttggtcgatcagggcatcgactccctcggaatgctcaccctcatggtcgctatcgaggacagcctcggcatcgaactggatcccgagtccctcgccgacggtaggggttccacgccctccggtcttctgtcccttgtcgagcagctgaaagcgacggtgtgacgacatgacgacgatggttccttgccgccgtgtggagatgccgcaactgttcgaccacatccccggaagcatctctctctcaggagggctgcccgatctgagcgtgctcccgagcaatcagatcgccgaactgacgtcccggatcatgcgtctcggctcaagaatcctcctgcaatactccaccccttcggtctcgtcctccttggtgccggccatcctggacctggcggaacgaacatgcatgtcaccggatccgcggaatctgatcccgaccgcgggttcccaactgggcctggccatggtgatcaatgcctttgacggcgatgagatcatctgtgactgcgccacctatcccggggcgctggccgccttcgcctctgccggcgtggaaacaacgggggtggccagtgacgaggaggggctcaacccagacgcgctcgctcacgccgtcgcagagggtcgggccaatggccgccgcatcgcagccgtctacaccacgcccaccttccagaatcccaccggctccgtacagtccgagaaccgccgtgcggccctgctcaaggtgtgtgctgacaatgacctcctcctcatcgaggacgatccgtacggcatgctgtccttcgacgggcagacgtggccagctctgaagtccatggacccacagcgcgtcatctacctgggcaccttctcgaaggtgttcgcaccgggcgtccgttccggctggatcgatccgcccgccaatcttgtcgagaaactccgcgctgtgtgcgagatcatgacactctcgccatcagccctcaaccaagcgatcatcggcgagtaccaccgtcgtcacggatgggacgaactgttggagggctatcgcgcctcctaccgcgaccgagcccgtctcctcatcggggctctcgaggctgaactggcaagaacgaattgcactggcacgtggacctggcgtgaaccacggggcggcttctacctgtggttggagaacgtcgccagcaccagcggtatcgacgttgcgcgtcgcgccgccgacaacggagtggccgtggtgcccgggaaacacttcgacgcagccggacacgattcgccgagcctgcgggtgtcgttcagcaattcacgcccggctgatctggtcgaaggagctcgtcgtctcgcccgtgcactggtgggagaggacgttcagaaatgactctcgcgacacgcaccgccaccgacaccctgcagcagaccttgccctggggcacccacgaacgtctcgtcttcgggcgggcgctcctgcgcagcaccggcttcccagccgaaggcttggccctgctcgactccgacgacatcctccccctcctcgactcctttcttgccggggacatcgacagaactcacttcgagaaggaatacaccagtcgcgaggagtccggcgcaagggcgctcatcaacgtcttgaaggacgatgcagtatcgcgcgccatcgcatggcagaaccccaccgcgtggaggtccttcgaatccctgtcgtccacgagcggaatcaatgcttcgactcggcgcaaggtacgccaactcgccctctactggcaacgttactgttccaaggctgagaccattggatacttcggcccgttcgcctgggccgaagtcgacccggaggcctctgcggtcgaattcatctcctccgaccatctgatcgaccgttcccacgtcgcaatggaggcgtgggcggtcattgagatcgggaaagccctggcatcacgggccgaccttcagtggtggatgccaccaatcctgtcccccgccgtcgacctcaacatggagagaggcaccgtgacggtggctggacaccagccacgacgggtccgggaggacgaggcacgagttctcttcctgaccgacggcacccgtcccgccgcccagatcgccaagagcctcgacatggagcccgagcggttgcgcaggatcctcgtggcccatgaacgtcgtcacaccgtgatctgggacgccaacatccctgtctcagtgcacgcgtgggacatcctgcacgaacgcattgcccagatcggagacgctgggctgcgagatgaggccactgctgttctcacgaggttcgacgagcttctggaggtcatccgcaacattcccgacgcccggtccctgacggaggcgacggaatccctgtcccgtcttttcgaaaccgtgacaggaacctcttcgaacagacgtgcgggccaggcatatgcagcccgcagcctgtgctacctggactgcacccgcgccggaaccgccaaggttgggacccggcttctcgaagccctcgacgcccccctcaacctcgtcctacaatccgctgactggttcgcggcgaccttggcaaaggaatacaccaccgaaatcacggacctcgcaaatcgaaagcagcgggcctcccaccagccactgaccatggctgatgtctggccgtccacgatgtcgctgttctggggggactcaccgtccccactgcagcgagccgtgaccgaactgtcacggcggtggagcagagtcctcgaggggctgcagccagtcgacggtcgcatcgacacgacatcgtccgctctctcgggcgccgtggacgagcagttccccgtgtgcaccccgattccagaactgtcagtgcacagcccggacctccaggtcatcacctcgagcactagcaacatcgcctccggacgagtcactgcagtcatgggtgagctacatgcctgtctgagcagtctcgacatgccgttgctcgagtggtcgctgccccatggttccattcgcgatcgcatcaacaccgcgctcaacctgcgacgtctggttcccttgttccccgagacatggaggcgcaacaccggccgcatggttccagcgacggtcggagtgggggatcgcgcaatcgggttcactcggacggccgatcaagaccgtgcgaacacatggtcgatgtcggcactgctgttcgagcagaccgaggacggactcatgatccgtgatcccgatggcaggctctggaccatcgcacaagcgtggagcgtgcccatctccatggtcgccgccgatgcgttcaagatcgggctgcccggctcaccagcccctcggctcaccattgacaatctcgtcgtgttccgtcgtacctggaggtttcccgctggctccatcgacatcatgcacggttcagccgccgagaaacacgctcggctgagggagtggcaggtcacgaatcaccttcctgaccacctcttcgtcaagttcccctccgaacccaagccgatctacttctccttcgagtcccccgccatggccacggtcttcacgcgatcactgcagcgcgacgcccgagagaatccagacagtctcgtgacgatgtccgaagcactgcccgagcctcaatcctcatggctgcacgacacccggagccaccactacgtccacgaattccggctgcaactgaccaaggagcgacatgacgaccacagttgagacacatcccgaaacacgtggcacaaccgcgacatccatctccaatctgatcggtcacacccctctcgtaagaatggaccatctgttcgacggcctccccttcgaggtgtacggcaagctcgagaagctcaatcctggcggaagcatcaaggatcgagcagcacaatccatgatcgaacgggcaattcgacggggtgagatcgtcccgggccgtacgaccgtcatcgagtccagttcgggaaatctcggcatcgccgtggcgatgctgtgccaggagcacggcctgaatttcatctgcgtaaccgatgccaaggccacgccaacgaacattcgactcatcgaagcgttcggggccactgttgaggtgatcgaagaacctcatcccgagagtggcgaattcctccccatgaggctcaagagggtaagagaactgctgtcagagattccagatgcatggtggccgaatcagtacgggaaccccgacaatccggcggctcacgagcggactgtccgcgagatcatcgaggcaatcccgcgggttgacacgattgtctgcgcgaccggctcgtgcggaacccttcgcggctgccacgaagcattgcgaaagctgtccccacgcacccgactcgtcgccgtggacgccaagggcagcgccatcttcgacgaggcaggagcaccccatccccgctgtgtcccgggacacggtgcgtcagtgcgaccgccgctgtggcgcgcggggctcgccgaccaactggttctggtctccgacgcggactgcgtcgtgggatgccaggaggccctgcgcaccgaggctcttctcctcggcggatcctcgggagcaattctgacggccattcaccgagtgtctcccacgattcccgctggttccaccgtggtgacgatcctccccgacggcggcgagcgctacatcgacaccatctacagccgctcgtgggtcgactcacacatccccgggctgccctctctcgccgactggggggctcccaaccccgccaattcgtatgacctgaacagaagtgcctcatgaagctctacaccagagagaccgtcgaaactgcgcttgtcgggcgtcatggccaggttctcagtgccgtacagagtgcatacatgctgcattcgacgggagagacatcgctgccattctcaaccttcctccgcccggccgggtatccgaacgatcggatcatcgcacttcccgcccacatcggaggcgacttcgacatagccggtatcaagtggatctcatccttcccggaaaacctcgaccggggccagcaacgagcttcctccgtactcatcctcaatagtctggagacgggatacccgaccgccctgctggagtccagtcagatttcagcaacgcgaacggcagcatcagccgccctggccagcgccaccctccatggctccgaagaccatgtcagcacgattggcatcatcggctgcgggacaatcaatcttgcaacgatcgactacctcttccacgtgcacccccagatcaacgaggtcctctccttcgatctgaggcgggagcgggcccatgagttctcgcacctcgtcaaggcttcgcacccagaggcccgggtccgtgtcgccaaggagcccgacgagattctggccgcaagcaacaccatcgcgatcgccacgaccgactcgagtcattggttggaccttccgccgtggcacgggccggggcaccaagtcgtcctgcacacgtcgctgcgagacctgtcagtgccctcgatcctggcagcggccaacgtcgttgacgatcctgatcacgtctgccgtgaagcgacgtccttggatctggcaactcagcagaccggcaaccgggacttcatcacggggagaatcggagacctccttcttggcgcgccgctgtcctcaagtcctgactcccgtgtcattttctcacccttcgggctcggcatcctcgacctcgcagtcgcctccgtcgtcattgctgccgcctcctcttcagcagtcgagatcaatgggttcgaccccgggaaacacgccacaagcatgattgaggtgaatcgatgaccaccacacagatcaacgacaacacggccgttctgcgcgacgtattccccgccggctccgtcgcattcgtgagcggtgcctcacgcggaattggcgctgcctgcgcgacagcccttgcggccgcgggatgcaacctcgccatcacttatcgaaggaaggagaacgaggcggcacaaatcgccgaatccattgaagccatcgggcgccagtgcatcacaatgcagatggacgtaaccgatgagaaccaagtgaccagagccttccgcatcattcgccagcattacggacgcctggacgccgcggtcttgaactcgggaatcaccagtgacgggcatcttgcaacaatgagccgctccaagtggagctcggtgatcgacacgaatctgaccggaaccttcctctgcacgcgcgaggcgaccaaggccatgtactcgtccggtggctcgatcgtcatggtcgcgtccaccagtggagttgcagggcgaccgggccaggccaactacgcagccagcaagggcggaatcgttgccatgatgaagacgctggccccggaggttgcggcaaagaacgtccgggtgaatgcggtggcacccggcttcattcagaccgacatggtggcggccgttccaaaagcggcactcgcccaggcaatccaacacatccccatgggccgtcttggcctggcacaggaggttgcgtcagccgttaccttcctggcctccccgctcgccgcctacatcacagggaagaccctcactatcgatggcggaatgatcaacggctgaccccaggacccggacacccccagtaccgagaaaggaacaacaatgaccgagatcacccacactgccaacagcatccgaacccgcgccgaggaacgttccaacaaagcttggcgcctgaaggaggagatcatctccaagctcggtctcgagaccaagccagaatatgtctcggacaaccaaccgctcttcggacgtggccttgagatggattcccttgacactctcgaagtcgtcgtcgccgtcaacaatgagttcggagtctcggtcaacgacgacgacgtacaggcgttcggctcgatcaatgccatggtcgatttcatcgaggtgaacgagaagtgagttctcttgcgctcgaggcgccacccaaggacgcccgtaagaaattcgcctacgacagcgatgccatcaagacgatgctcccacatcgttggccgatgctcatgattgatcgcgcctacgacgtcgtcccagggaaatcgggcaaaggcatcaagtcggtcagcgtcaatgagccgttcttcgccggtcactaccctgaccattccatcatgcccggcgtcatgatcgtcgagtcgatggctcaactcgtggccgtcatctacgtagccgaggccattcagaacaatcccggcatgacgtcgcacgacgcacgttcaagcgttggttatctcggcgcgatccatcagatgaagttccgacgcctcgtcactccgggcgaccaactcaccctccacgcccagctcggcgagaaagtgggggctctgcgcgaggtttccgtgagagcactcaatggccgggatgtcgtcgcccagggggaactcgtcgtcaccgagcggtgacacccagccacacacgagaaggaagtcccatgatcgttcgcccctacaggccacgtgatgcggaagcgatcgtacatctctacaacagccattccgactcccccaatccagtgtcgggagggattgttgaggaggagttccagagggagctcgaagaacgtggttcgacagtgttcctagtggccgaggaggccggatccattgtcggcacattcgggatgttccgcacgaatggccgacacaccatggccgatgatgaagtcttcgccgacatgttctatgtcaccccgtcacatcgactctcgacagttccgggacagctaatcactgaagccatcagcgagtgcttcatccagggcatcaacgtgatccgcctcaccgtgaaccccgcgaacatctccgcgctcaaggtttacagaaaagtcggttgtgcctgtctcggggccaccgatgcaggcgaggacgggaacattgagctgtacaacttcatccctctggttcttagggcaaccatcaccaaactcgaccacgattgtattcgagccctggcggacatgacttcgttcgcctgcatcaccgagggacgtccacttgatctgtcccacgacttcatcgtggacgctggacggaagatcgtctcccacagcatccagatcgggcgttcaaccatccacgccatggtcgacacgggctcgaggaccattgtggaggccaccctcgacaaccgcgactgggatgctcctcgccagatcgtcgcccccaccccctgtcagaaccggcccgaggaacagcgaggcaaccctgtccggctggtgcacaagaagcttgaggtcaccttcaacgaaggagtcattgagatcagtacgactggccactggggcccggtcctcgcaatgtcctggccctcctccgtctcgcaccgcgctcacgggtggcgacagggccccgccaagtcgtatcgatgcgagcttctcgagaattgcctcgtcctggatgacgaaggaggagtgaaatgcaccatcagcctcaatgattgccaagtcgcgatccggatggatggtgccccaaaaacggaattgagaatgtaccagtggtgcagcctgcgccagggctatctgacggctgacaccggcatcacgagcttcaaccgggcatccagtgggctcggagtcgccgtccgggactcgtccgagattgtcgccgcgggccttcccgtcatccctgacacaccgatcacatggagtgagggtgacatcacggttcagctcgatccctgcggccgcgcctccctgatccactcgaccctggtggaccgaagaatccacttggacgagtctggctcggcaagtctcaccatgaccgtgtttggtgactcccagccccatcgtgccgacaccgtcgagctgcctcccctcgcggcaggcaccgacaggatcgtcctcaagccggctgccggaggcgtgaccacatggcgcttgggcgccaccaaggtgctcaagtcaccgtggccacacgcccgcgcgctcgggcccaatccgatctggcgagccggcctgtgggtcagtcacgagccggatcgccacgaccgtcgccaaggaatggggtggggtcccgatcatcgcagttggaccctgtcggaagacaccatgaccagtactgacgggacactctcctggcgcttcagcggctcccccgacaccggctggacggtcgacgtcacgacgagcaacacgcacggggagaccgtcgtctggctcaccccggactgcccggcgggcgagaggatccgcacgtctgatcatgccgtgacgaccatgcttgacatctcgaagccatggcagcgctggaccacccgatgcgcaattcctctcagacacgggaagtggttcctcatcgagcctgatcatgacctcactgattcccccgaaatcctcatgcgctctgttcacggggtcctgctcgtcggctgtgtcggacgagcccactccggatccgcttcctggcgctttgccatcacgtcagaactccccacctccaacccaagaagaaacgactacacctcagccgcctgaacccaaccagttggaacacccactacagaagaaatggagcaccaccatgtccatcactgagcagtacaagacccttcgcacctcggtcggcctccacacgcctaccggtcccctggtccgtatcaccggtgatgatcgtctcgagtttctcgacaccttcctgtcccgcgcctcggacttcgtggaccccgacaccactcgggagtgcctcgctctcaccgaggacggccttccgctgacgatcttcctccacatcgagcgcgaggaggagtcatggctccttccccgcaccgccatcgatgcggcgaccctcgccacgtacctcggcaacctcgagaccgatggtgacctgtcaatcgagattgctccagagggttggggagctgtcgctgtcgaggggccgctgtcgtggcagatcgccgaaaaccttctcgacttcgacgtggctggcctcgttcttcacgccgtcacggacgtcgtcgttcccggggcccccgagggatcgaaggcatggctcgcccgggtcggaaccactggggagtacggctacctgctcgtctccaacgttcccgacctcgcccgcacttatctcctcagccgcgccacggagctgggcggtcaggcagtcgacgccgatgctctcgcacgagtccaggccgaggccgggatgccctattacgcgatgggcgtgtgccacctcgatgtcgccgggggtgacctcgcctggctcgtggactggcagcgcatcggcgagttccaaggatccgagaatctgcccacacccgtccgagaccagcgccgactggccgccatcgccctgcccaccggcaaccgcccggaagctggtcagaccgtcgctgccggggatgaggagattggagtggtggtgtacgtcaccccgtccgccaatcccgatgaggaactcgcgttcgcacttctggatgctcctttctggactcccacccttccgttgaccgtcggtgcccacgacgggaccacggtcaccctgccccgcgtcgtggcagcctccagcctcaacaagctggggtgacagcgatgacgatcactgctgagaacgccaccacccgcagcgacattgcccggagcattgcggtgaccggcgtgggactggtcacggcacagggtgaccataccgacgagtgctggaccgaacttgtcgatggggtttgcggaatcaccatgaacgtcacgttcgatgactctggcaccacgattccgtgtgctggcgtggctcccattccgaactctgattcgatcgaccgctgttacctgctcggcgtccatgccatgcgtgaagctctcgagatgagtggcatcgacctggactccgtgggtcgtgatcgcatcggactcgtggtgggctcaagcctcggcgcgatgcccaccttggaggcggctcatcgccgggccattgagaccggcgtgctcgatgccggattggcggcagactcccagctcccctgcgtcgccgaccacctcgccgctgagttcgacatccgtggaccccgcgtcgtgacatcgaatgcgtgtgccgctggtgccgtggcgatcggctacgccgcagaactcctctggtccgacgatgtggacctggtcgtctgtggcggtgtcgatccactggcccagatctctgccaatgggttcacgtgcctgggagctctcgacaatctcccatgcagcccgatggccggttcctccggtctgactctgggcgagggagccgggttcatggtcctcgagagaacagatgcggcggctgccagaggccaggaggtgatggccgaaatcgccggctacggcacaagttgtgatggttaccaccagactgccccggacccgggtggcaatggcgcccgcagctcaatggaggccgccctgcgctcagctcatctcaagccgtccgacgtcagctacgtcaatctccacggcaccggtactccgaccaacgacgccgtcgagccgaaggcactccggtcattgttcaagtccgatgaccttccccctgtcagttcggtgaagggcgccatcggtcacactctcggcgctgctggcgccatcgaggccgtgtgctcgatcaaggccatccacgagggggtcctgccgccaaccgtcaacaaccgcgggcaggcttcccgaactggtctcgacatcgtgccggagtgcgcacgcaaggccgctcccgacgtggtcatctccaactccttcgccttcgggggcaacaacgcatcagtggtcatcaccgcacctcgaggaggcgttcactgtaccgccccggcgcagcttcgcgaggtcggaatctcaggaatggcagctctggcgggaaaggccgccaactcggaggagcttctttcggccctgtcagaagattgtccaatctggatggccgatgagaagacctgggaaggggatgctgtccaaaccggccatgtggacatcaagcgcctgtcccgcacaatcaacccgtccaaggttcgtcggatggaccccttgggaatcatctccagcgcggtggtgactgatctgtatgcccgacacgggaagctgagccgcaaggatgccgaaagcacgggaatcatcttcgcaaccggctacggtcctgtgacggcggtgacgcagttcaatgacgggatcatccgccacggttccgagggtgccaacgccctggtgttcccgaacaccgtggtcaacgcagccgcaggccacctcgcgatgctgaatcgctaccgtggttacacggccaccttggcatgcggtggaaccagttcactcatggcgctgcttctcgctgctcgcgtcgttggccgcggcgctgcggatcgcatcatggtcgttatcgctgacgagtttcccagcattgccgtccaggccgtcgcaaagcttcctggctaccgacacagggttgatggttccggagccgtgctctcggaaggcgcggtatgcgtcctggtggaggccgtcgaagtcgccgaagcacgcggtaccgcccccatggcgctgctacgcggcttcggatcccgtggagagtccgtgggagtcggtcacaccgcatccgatggacgggcttgggccaaggccatggccgctgcactgggccaggccggcctgactgcctccgacgtgtcgaccgtcgtggcggcatcaagcggacatcctcgcgtcgaccgagccgagcaggcggccaggcggatcgtcggactgtccgcaaccgctacgaccttcccaaaggcgattgtcggagaaacacacggatcggctgccgggatcgggctgttcggtgccctgtgcggttcgaggtcagccgcgcaccagaacatccttgtcaacgccttttcccacggcggtggttatgcctcgatggtggtggagtcactgtgaccacgacgcttctgccacgggttgcccagccgggaccgggcgtcagccatgtcgacaccgaccgtcccatcgagtgcatcatcacccaccacccccacatgccgcgtgatcgcggaggccacgccacctccgtgtcaggcaggtacttgctgcgccaagccgcagaactcatgctcggcacggatcctgcgcattgccccgtcgtcgacccttcgcggcgctggtactggcccggaatcaatcttcacggttctgtctcccatgtcccgggctggagcctgacgacgctgagcaccggcggccacatcggggcagacatccaggacttccgggagcgtcccggcgcaatggcattcatcggtgacctggtcaagctgtcgcgatcggcgtcactccgagaattcgcggagtgcgaggccgtcgtcaaggtgtccgaattgactaaggagacgttcgggcacgtgcgactgcccgaatggacacccggatggcgccacgttttcgaggactactgggtctggagtctcgagatgcacgggatgggagtcatcgcactcgcatccgatctcccccgagccattcgctggtggcggtgcgacgccgatgcccgtggccgtctccaggctctccgacccataagcagtcttggaccaggaaggccgtcatgagccggtactcacgtcgaatctcaggcatcgaacgcggctatctcaacgccgcaacccggggcccgcaccccaccatccacacgatgatcgacttcgagggccgcgtccccgccgactgttggcggcacgcatccacgattgcgtcggccgccaaccctggcatgacagtggtccggaggtcgggccgatggacatccgatccagcgggctgtccggttgtgttccacgactggaccgcggaccccaacgacgttgccgacttccacgctgacatggatctcgtgacgggaccatcgtccacgctccacgttttcgagggggcggaacgcacccgaatcaccttggcagcaagccatgccgtgaccgatgggcggggcatcgaacgatttctcgtcgacctgcttgcagcgttggacgagcgtgaacccattggaagccccgacaccctgaccgatgtcgatatcaaacgatccttggagaacagcatcaagccccgacgccacctggccgctgtgcccgccgatgtcctttctccactgggggggaggaagaaccaacgtatatgggcctccaggacgtggcacagtgccccgggagccatgagcggaagaatcgctgccgctgtggccgagatgatcgaccacgccgcaatgatcatcatcccggttgacatccggcggcacgtcccagaggtccgatccacagcaaacctaagtgcccaactgccagtgatcatcaccccgaaccagcgctggcaaagcatccatgggcatctgctcacggaccttgctcgccatcgagaccttgcgatcatcagtgaggatttccgccacaacaatccgttcgcatcgaccttggaggaaagccaggccatcggcctcgatggtgtctatccctgtgccgcaatcatctccgaccacgggaagctcgacctttcaaggttccagaccttggaactcaccccggtctcgatgcgaagcctcccgatgctcgttccctactccgcaatgttcatcagcagttgcaccgtcggcgagaccaccactgtcaccatcgctcatcgcgctgatgacgatcccgattccataaacaccttcttccaccacatcgaatcccagatgtccatctgagccacgtcgtccctggagagcaaacatgaccacccaagatgtcatcaccccgccgcgccccgtcacctcccatgccacggcgaccaggtccgaggctccaccgcgaagcgtcatcagagccatggccatctcgatggtcgcgaccctcatggtcatgctcgacacgaccgtcgtgaacgtgtccttgagcgcgaccaccgcccgcttcgggagcatgggcagcgtgcagtgggtcctcacaagttacctacttgcactgtgcgcgacgatgacggcctccgcctgggtcatcgaccgccttggtccacggctcaccttcatcgcctcaatgaccatgttcctcatcggctcggtgatgtgtgcactgagcgattcagtgtggcaactcgtcactggcaggaccatctccggtgccggagctgggatccttgttccgacagcatccgtcctgcttatccgtggcatcccacgcgaacaacttggcagggtgcaggcactgaatgggagtgtccagttgatcgctcccctgatcggcccgactgtgggcggtctcctcgttgacaggtgcgggggctggccggccatctactgggcgaacgtccccgtagctcttgttcttctgattgaggccgtccgcgtcgatccggacgaaccacacaccgctaagcgccgcctcgatgctctcggcctggtctgtggcagcaccgcgatcgtgctgacagtgcttggtgtctcactcttcggcaggacgtcgcgaaacaccaccttcctgcttacgatcggcgcgcttgcagtcctcgcatgggcgttcttcatcacccacatccgaagggctaccaaccctctgcttgacgtttccctgtatcagaaccctgtctattcatggtccagcttcaacgtagcggtgcttggtttcggtctctacgcccccatggtcgtcatgcccctctatctcgaggcgacgcgccacctcactgccgtccacactggtctggtgatgtcagtggccggcgtcggcgtcattatggccggaatcctgtgcacgaagatcatgggccggatcggtggaggcctcacgatgacagttggcataactctgagcatcatcgccactctgcccctggcccggctgacgaaccacacctcctacatactcctggcagtctgcttggccttgcgtggagcaggaatcagcctgacaatcgtcccagccatgacacgggccttcgagtccatcaagaggacggccatggcggacgcctctgcacagctcaacctgttgcagcgaatcggcgggacaattgcgacagcagtcatcatcgcagttatccaccacgaggccatgctcacccgcggactctcccccacagtgttctcgcacgccaacgtgtggatcctcaccgcgaccgccgtcacccttctgccggccttcgcgcttgcgaaggccgaaagacaacagcaggatctctgagcaccgaggagtactccctcgtagaccctcctctgatctaattgggttcgttccaagtgtgtatctcactccggggagccccgattgctgaaccacatcccgttcaccctggcgagtccctcgtggtacgacgtcccctgggcgcccggatctccgtatctcacaggagatatctcggtcctgccagcggactcgccaaggtggacgacgaccatccggggtccttggcaaatccacatgccacctcgtccgacccttccagaggtggggtggaaagtgcatgtgtctgccaagccatcggaattggaatcggttgcctcagtcgtagcactgtggtgcgtacgccacagcgtccccttcaaagtacttcgcacccgaggtctcgttcacgcgagtcaagtcaagtatgcggaccgaagtcagagcggcaaggtctgcacctgctaccccgacggcgagagccttgagcacttctgctccggtcttgccgagctgcttcagaacgtcgattcacctccggtgtccggcgagctgcgagtcggatcctcccctctgtggttgcgtcacgggagtttccgagaggcatgggcggtgtcatccacaggagtaccgttcccggtctacccgggaacaacacatcctgatcgtcgaggccccgcgcccgcagaatccgatcacgacacgccgtggatccggaggctccgtcggacgaatcgccccagcacggttcttcccatcgacgatgtcagactcctccaccaatcaaatgctggcggcgtgtatcaggcaacatggagagacggcacatcggtagtcgtcaaggaggcccggcacctgtccggacttgatgcggcgggtgtcgacgcccgagtgcggctgcgtcacgagtacgaggccctgagaagactggacccctatcgggccgctccccatcccattgatctcattgagaccgaggacggctcgttcctgatcatggaattccttgacggaatgacagtccaccaggagatgtcgaggttccatcctctgattggtaggcgacctcatcggctatcgatgaccgatttttcacgctggtgccgagaggtcgaagatcgcttgaggaatgtcacgagggtcatggccgggtgcggaatcgttcacggggatcttcatcccgcgaatctgatacatgtcggccatgaggttttggttactgactttgaatcctgctcaatcgacggggtcgccgtctcgtcagggatcgccgctccctggttccagtcggacgacacgattcccgatccggcgacgactgacgatctccacactcttctcgtggatccgacttgcggccccgcgcttgtcctccatccaaatcttcgcgcgctcatcagccaggccgcagtcgaggacatgatgggaaatccgactggtttaccacatgcctggaacctcgaggacgtgacaagcgaactcgccaaggggatccgggcatcagccactcccgcacgagccgaccgcctctttccctcagacccctacctgttcgggcatccaggttcagaattcggcctgatgcatggcgccgccggaatcatggctgctcttgccgtgactgggtacggtgttgacgcgaatcacgtgacctggatgaaggaccgcttggccacccgcccgaccctgctgccggggttggccaacggaatcgagggaattgccctgggtctctccctgtgcggtcagaacgacatggctgcatccctgctccaccagtccggaattctcacgatcacaacgaacggatcgactgacctcaccctcggtactggtatggcgggccgagcgtgcgcgctgcagtccctctcacaacgactgtcatcgaaatctctcgcccacgctgcatataccctctgggaacaactcgccgtggctgtgcggaacactgatgtggccttgccgaacggcctgttctccggttgggaggggatcgggctctccctgcttgcctctcccctgccggatcgtcatgatctcgcccgccactcactccgactggccctggccacgacaacgattgttgacggtgcgctcttctcaggcgagggacagatccgatggccatatctggggcgtggtcccgcggcatgtggcccgctcgccgccaggcttgatgatgaccagacggccaaggccgtggcacagacctgtcgttgtcccctgactgagtcatccggtctccacaatggccgcgcaggtctcctactcgtcctccgccagctcgtgggagaccaagacgacgccgttcgccgccacctcatgagactgtcgtggtcgatggaccgtcgcgaggaaggcacattgctgctgggtgatcatggcctgcgtttctcatccgatctcgcgacggggtcagccggcgccctcctcgccctgagcagggacccatggcggaacatgacacgaatgctcggaatatgcgatgacacctgtcatggcccactagtgacagtttgatctagcgccgatagttcacaactgaaagactccaaacatcgaggaaaacatgctgagccaaaacgccttggcaggcgtggctcgtttcaccacgatgaacaccaggagacagaatgtccgttgaggccatgcaatccatcgagatggacgaggaaaacagcgccagccagacagtttgcgcttgttacagcttcttctcgtggtcaggatgctgcgtagtctcccaagcggtggaagcatcttgatcgtgtgagacgccgtcgactaccctgtcccccgtggtacgcacacgccccgtcctggacagtcccggaagaccgctcatcgcctccggagtcgtcctggcggtcctgctcatcatcgcggtgatgacgatggtgcttcagcgcgaccccactctcacccccggacgccgcattctcggtatcgtcctgtccacggtccaggccgtcggattcatgtggctgcagacccgcatggttcgtcacggcaagggttcgcgcaacatgcgtgcgacccttggaagggtcggtttctgggccacgtggggactcgtcgcagtgggagtcgtcaatctgtggctgaccaactcgtggaccctcttcggggcctccgtcgccacgcccctccttctcctgccaggggtgtggagtgtggtggccaccctcgtgaccctgatcgtcggtttctccgacctcgtggtcacccacacctcgccactgacctcagccacggtcgtgctggtgaccatcgcggtgtcggtgaacctctacgcattcacgaagctgtcgacggcactcgttgaactccgctcctcccaggaggagatcgcccggctgcgcgtggacgccgagcgtcaccggatatcgcgggacctccacgacatcatcggtcgcaccctggtcgccacgtcgatgcgccagcaggcggccctccacctcgtcgaccgcgacccgcaacgggccaaggaacagctcgacgccgcccatgacgcaatcaccgaggggcagcaccagttgcgttccatcatccaggccgagatgagcaccagcctccccgacgagatcagcgacgccacattcctgtgcgaccgactccacatcgacttccgcatggatgaccgcggcagaccgcacaaacccttcgactcggcggcggcggcggccctgcgcgagggaatcacgaacatgctcaagcacagcgcggcgggctactgccacgtcgccatctccccggacctcctgaccgtcaccaacgacggttgtccgcaatcacctcgcccctccaccacaccgggcaccggaatcgaccatctccggtcccagatcgaggcgctcggtgggtcggtgacgacgtcgcggccctcgcggggcaccttccggctccgctgctccttcccgacccggggggcgtccacgaccacacccgcaaccgaaggaggacgatgacgacgagaatcctcctcgccgaggacatcaaactggtggcagaggccttcgaggcactgctctcggtggaaccggagttcgaggtcgtcgcacgggtggcacgcggcgacgacctggtcacatccgccacccgcctgttccccgacgtgatcctggccgacatcgacatgcccgggatgaccggcatcgaggccacccgaatgcttcgcgacaagggataccgcggcagaatcatcctgctcaccgccctgccgggaagcgggcacctgcacgccgcgatggctgccggagccgacgggtacctgctcaagtcgatcaccgcgccctccctcatcaacgccatccgggcggtgtgcaacggccagtcggccatcgacccgaacgtcgccgcggtcgccatgcgcaagggaccctcgcccctcaacgaccgggaaaccgagattctgcgcctagtcgccgacggttcctccaccgcgcagatcgcctcgcggctgtacctcagcaagggcaccgtcaggaactacctgtcgacggcgatgtcgaagctcgacgccgactcacgcacagcggcggtcacgcgggcacgcgaggagggctggctgtagcaggcgacccgctcagcccaccgcccctcagcccaccgcccctcagcccgccgactcctgacgcacggcctcctcgaccgcccggctgagcagggacccggccctgaccatcgacgtctccgggtccggctcgaggtcggacaacgcgatgatccggtcgaacgcggaccgtttctcctcgggcaggtcacagcgtccgcacaccgcccagacgggcaccccggcgtcccgggcgatcttgcggatggtgtcgagaagcttgccgagcagggtctgctggtccagccgcccctcccccgtgacgacgagactggaggcggagatccgcgacaccgcgcgggaccatcccaggacgaccgccgcgcccgggcggtacctggtccccaggcacatcagcgcccagccgacccggctgggcggctgcgaaccccctggccaccgcccggcaggcctttcccgaactcagcgaccccttgaaggagtcgacggcaacgatgaccggcgcattcggatcaggacgcatgggatcagcatgtcacgtcgatacggagcagtcgcgccgcctacccctagactcgggggcatggtcaaccgagtctacctgtccctgagcgttctcgccctcgtgctgtgggtggtcgcctaccgtcacatgccgggctgggccgcgggcatcaccctggtgggcatcgtcgtgctgtcgctgtggtgcgagtggtcgcgggtgcgcaccctggccaggatcggcaagtcccgccagcagggcccccgctcctcccgaggacgcaacctgtcgtgagcaatacgattcccgcagccctccaccccggccctgacgaggcc

SEQ ID NO: 434 - DNA, 26636 bp, Propionibacterium acnes
  source 1..26636: mol_type = genomic DNA
ccttgtggacaccacgtcatccacatgacttgtgtcacatgattcccggaccatcatcaagcagatgctcacccaactgtaatgatttctgttctgaatctggacatgctctgacctgcattcaatgatcaattccgtgcgatattccacaacgcgcggagaggtcgcagacaatgacaacagaaagcatccccacgcggctgctcgtgtggcacgagcagaccgatccgaccaagctcctcaggatcaccgacgcgatcaggaggggggatccccttccccccatcgaggccatggcgatcggccacaaattcctcgtcctcgacggtgcgcaccgggcccaagcccaccagtactgccatcgatctgagatccgagcccgcctccacaacctccccctcagcgcggaagtaccaggctggagccactccataccccgcgatgcagcagcgaaactggctcacctactcctccccgtggacgctctcggtcaggcggaacatcgtcctgcacggggtgcgccgtcaggtggggaccgcttcacaacgaccgcgcgacatctttctcgcctgccaccggatcgcgcgagttgcctacgcgcatggaatcagacctctcggcccggagttctccaacgctccgacgatcgacgccgccaccatgacctggcccccgccgaacgtgggcacgttgtgggccatcgccagcagtctcggacccctgcccgcaactgtgacccggttcgccccgatcctccggcacgacgccatcggggattccgcgatgacacccgtcacctccgccgcgtgacgacccgcgccaattccgccccaccactggatgaggggcagccgcgtggacgatgctcctgttcaggcagggactccatacgagaccaataggaaaatcatgatcaaaaacacaagccctctgaccgtgaaaaatgtctcgaaaacattccgtggctccagcggagaagccatcaaggccgtgcaagacgtgtcattcaccgttgagcgtggtgaggttgtggcattcctcggcccgaacggcgccgggaagtccaccaccatcgacatggctctcggcctcacccgccccgacagcggccagatcgaggtcttcggtactgacccgctcagcgcggcccggtcgggacgctgcaccgcgatgacacagaccggcgggttgctgcccgacctcacgattgggcagaccatggagatcatctcctcgctctatcgtggctcccacatgaatgcctgcatggagcgagcaaggatcacgcatctggccgatcggcaggtgtcgatgtgctcgggaggcgagcgccaacgacttcgcttcgcactggctctgctgcccgatcctgacttcctcatcctcgacgagcccactgcggggatggatgtggaggcgcgccgggacttctgggcagagatccacgaggacacgcgtcgtggtcggacaattctgttcgcaacgcactacctcgacgaggtggacgagttcgccgatcgggtcatcctcatcaaggagggccgcgtcatcgccgacgacacctccgacgcgatccgcaccatgtcggggggttgcaccgttacggcgaccattcccgacttctccctggcacgactgaatctgccgggcacccaactcatcaagcagggcggcgcacgcgttgatctgcaccatcccgattccgatgccctcgcagcgcgagtcatccagctcggcggcaccgacctgcgcgtggtcccccgcagcctcgacgacgccttcctcgctctcacctcaaccaccaaggagtcctgacatgaccgcccaagcgcttcccgcagtcgccactcccaaggcccgccaccgatccgccatctcgctgaagtacttgtggtgcgagatgcgtcgccccttccggcgttcgacgatgctgttcaacctcgccctccccgcagttctgtacctggccctgttccgcaccgtccacaccgccgagctgccggacgggaacttcgcgatgtggatgatgatcggcatcgctgtctacggagcggccactgcgagcaccagctacgcagcctccatctccgtcgacgaggccaacgggtggacccgcaccatccgcctgacgccgttgtcgtcggtcgggtacgtgctggtgaaggtcctctgcgccatggccatcgccctggccccgaccctgctcatcggtctcatcgggctgttgaccggagctcacggcacgctgcgggtctgggtaatcggactgggggcggcttggctcagctcagcaatcttctccgccttcggcctggctctcggactgtccctgcgtcccgaggtcgtcatgcacgtccccggcctggtcatcaccggtctggcgttcctgggcaacgtcttcgtccccctcagcgggacgatgctcaccattggccgctggagccccgcctacggcatcaccgcgctggctcgttacccgctcaccaacggcatcgacatcgggggcggccacgactccctgacggctgccctcatcggcaccttctgctggttcgccggattcgtgttctgggcctcccgtcgatttaccaagagcacgggtcgtcagtgacagattcggccgatctccggaaggagcagtgttatgaccaagcccctcattgcagtggtcaccgcgggccaaggagcgcagaagcctcgcctgctcacgccatggctcaaggtccccggcgtcacggagaagcttgctgcatggtccgctcaggccgatgtggacctcgtcgagctcggtaccagggcgaatgcagaaaccttggcagcgaccgagaatgcgcagccactactggtctgtctcggagtcctcgtctcggatctcctgaccgaccagaacattgtgctcgcaggacactccgtgggcgagctgacagcagcgtgtctcgccggggtagttgatcccgggacggccgtcactcttgcacgacggcgtggactggccatggcgcgggcctgcgctctccacccgaccaccatggcggccatcattggtgacaatccggatgacgtcctccggcggctctcggaactgggactcacggctgccaacatcaacggaggcggacagattgttgcggccggctccaccgacgcgatcgcggaactggtggcgacccctcccaacgggaccgcagtcaagccgttgcgagttgctggcgcctttcacaccaagtacatgacacctgcgcaggacgctttcgcccaagctgctcaggacgtcaccttctccgacccgcagcacccgatcatctccaacctcgacgggcaggagatccggtccggcaatgacctgcgtgaacggctgattgcccaggtgaccgcgccagttcgatgggatctctgcatccagcagatcgcggatcgtcagccggaactcgccctatcggcccctccggggaaggtgcaggcgtcgctcttgtctcggcagatcccggacctcgcgacggtctgcatcaccacaccacgggaggcagcccaggctgcacagcggatcgaccagtccgtatccgtccttcagggggcatgatgctcatccccgagtacttcctcacagcctgttcggaccatgctgagcgcctggcgatcatcacccacaatgacgttgtgacgtgggccgaactggcgactcgcgtcgacggttttcggcgctggctgcgggaccatggcgtgcaccgccaggacagggtcgttctccagacgccaagcaccgtaggcacggtagccctcatgtgggcctgcctgctcgacggcgtgacgatggtcccggtgcaccaggacctcactgcctcccaggtgcagcaagtcatcgacgactgccgtccagctctggtgtgtggcagcccggacctcgtccaactcctcaactcccccggaatgaagacaagcacacctccaacgcggccggagtcaacgagtattctgccgtccttgtcccgggtcagccccgatgaccttgcgatgctcatctatacgtccggcacgacgggtctcccgaaggggatcatgtgtccccaccggcaggtcgccaccgccgcacggatcgtccatgactgtctcgggtaccgcacggacgacgtcattctctgtcgcctgccgttgtccttcgactacgggctctatcagattctgatgtctgccatctccggtagcgcggttgtcctgcgggacggaggcgcgcaggaccgcaacctggtgcgcgacatcgcccgtcacggcgtcactgtcgttccagtcgtgccgtccatggcgtcaatgctcatcaccctgcagcgtcgtgatcagttgccgaccatcgtcagactgttcacgaataccggggcgcgtctggcacccgagaccgcgaaccagttgctcgcaagcttccccggctcccgctatgcgtcgatgtatggcatgacggagtgcaagcgcatctccatccttccggtggaggagtacgagacgcatccggacagcgtgggaagagctctgcccagcactcacgtcgagatcgttgacgctcagggagttccggttccggcgggcgagcacggggagatcacggtgtccggcccgaccgtgatgaacggctactggcaggtgccgaacagtcccagtggacgattccgacccagcggccacggcctcactctgttcaccggtgatcgcggctggatggatgaggagggacgtctctacctcctcgggcgcgacgacgagatcgtcaagcatcacggcatccgaatcagcctgcaggagatcgagatagccgccgaagccgcgccgggcgtcgacgcagtcatcgctctcaagccggcctccgactcggcccccattgaaatcgcctactgcggcagcacgagtcccgagaacctggcccgccatctcgaaaccgtcctggaccgggcgcgacgaccccaattcatccaccaactccagcagatccccctgacccgtaacgggaaaccaaaccggtcagcagccgccgaggccatccgctcaagggcgtgacggcgaaggccaacacccacagacgaaaggaaaccaccatgacccaggccgagttcaaccagttcatcgagtccacctgctccgcgacgatcgtggatcccgaccgtcctttggtcgatcagggcatcgactccctcggaatgctcaccctcatggtcgctatcgaggacagcctcggcatcgaactggatcccgagtccctcgccgacggtaggggttccacgccctccggtcttctgtcccttgtcgagcagctgaaagcgacggtgtgacgacatgacgacgatggttccttgccgccgtgtggagatgccgcaactgttcgaccacatccccggaagcatctctctctcaggagggctgcccgatctgagcgtgctcccgagcaatcagatcgccgaactgacgtcccggatcatgcgtctcggctcaagaatcctcctgcaatactccaccccttcggtctcgtcctccttggtgccggccatcctggacctggcggaacgaacatgcatgtcaccggatccgcggaatctgatcccgaccgcgggttcccaactgggcctggccatggtgatcaatgcctttgacggcgatgagatcatctgtgactgcgccacctatcccggggcgctggccgccttcgcctctgccggcgtggaaacaacgggggtggccagtgacgaggaggggctcaacccagacgcgctcgctcacgccgtcgcagagggtcgggccaatggccgccgcatcgcagccgtctacaccacgcccaccttccagaatcccaccggctccgtacagtccgagaaccgccgtgcggccctgctcaaggtgtgtgctgacaatgacctcctcctcatcgaggacgatccgtacggcatgctgtccttcgacgggcagacgtggccagctctgaagtccatggacccacagcgcgtcatctacctgggcaccttctcgaaggtgttcgcaccgggcgtccgttccggctggatcgatccgcccgccaatcttgtcgagaaactccgcgctgtgtgcgagatcatgacactctcgccatcagccctcaaccaagcgatcatcggcgagtaccaccgtcgtcacggatgggacgaactgttggagggctatcgcgcctcctaccgcgaccgagcccgtctcctcatcggggctctcgaggctgaactggcaagaacgaattgcactggcacgtggacctggcgtgaaccacggggcggcttctacctgtggttggagaacgtcgccagcaccagcggtatcgacgttgcgcgtcgcgccgccgacaacggagtggccgtggtgcccgggaaacacttcgacgcagccggacacgattcgccgagcctgcgggtgtcgttcagcaattcacgcccggctgatctggtcgaaggagctcgtcgtctcgcccgtgcactggtgggagaggacgttcagaaatgactctcgcgacacgcaccgccaccgacaccctgcagcagaccttgccctggggcacccacgaacgtctcgtcttcgggcgggcgctcctgcgcagcaccggcttcccagccgaaggcttggccctgctcgactccgacgacatcctccccctcctcgactcctttcttgccggggacatcgacagaactcacttcgagaaggaatacaccagtcgcgaggagtccggcgcaagggcgctcatcaacgtcttgaaggacgatgcagtatcgcgcgccatcgcatggcagaaccccaccgcgtggaggtccttcgaatccctgtcgtccacgagcggaatcaatgcttcgactcggcgcaaggtacgccaactcgccctctactggcaacgttactgttccaaggctgagaccattggatacttcggcccgttcgcctgggccgaagtcgacccggaggcctctgcggtcgaattcatctcctccgaccatctgatcgaccgttcccacgtcgcaatggaggcgtgggcggtcattgagatcgggaaagccctggcatcacgggccgaccttcagtggtggatgccaccaatcctgtcccccgccgtcgacctcaacatggagagaggcaccgtgacggtggctggacaccagccacgacgggtccgggaggacgaggcacgagttctcttcctgaccgacggcacccgtcccgccgcccagatcgccaagagcctcgacatggagcccgagcggttgcgcaggatcctcgtggcccatgaacgtcgtcacaccgtgatctgggacgccaacatccctgtctcagtgcacgcgtgggacatcctgcacgaacgcattgcccagatcggagacgctgggctgcgagatgaggccactgctgttctcacgaggttcgacgagcttctggaggtcatccgcaacattcccgacgcccggtccctgacggaggcgacggaatccctgtcccgtcttttcgaaaccgtgacaggaacctcttcgaacagacgtgcgggccaggcatatgcagcccgcagcctgtgctacctggactgcacccgcgccggaaccgccaaggttgggacccggcttctcgaagccctcgacgcccccctcaacctcgtcctacaatccgctgactggttcgcggcgaccttggcaaaggaatacaccaccgaaatcacggacctcgcaaatcgaaagcagcgggcctcccaccagccactgaccatggctgatgtctggccgtccacgatgtcgctgttctggggggactcaccgtccccactgcagcgagccgtgaccgaactgtcacggcggtggagcagagtcctcgaggggctgcagccagtcgacggtcgcatcgacacgacatcgtccgctctctcgggcgccgtggacgagcagttccccgtgtgcaccccgattccagaactgtcagtgcacagcccggacctccaggtcatcacctcgagcactagcaacatcgcctccggacgagtcactgcagtcatgggtgagctacatgcctgtctgagcagtctcgacatgccgttgctcgagtggtcgctgccccatggttccattcgcgatcgcatcaacaccgcgctcaacctgcgacgtctggttcccttgttccccgagacatggaggcgcaacaccggccgcatggttccagcgacggtcggagtgggggatcgcgcaatcgggttcactcggacggccgatcaagaccgtgcgaacacatggtcgatgtcggcactgctgttcgagcagaccgaggacggactcatgatccgtgatcccgatggcaggctctggaccatcgcacaagcgtggagcgtgcccatctccatggtcgccgccgatgcgttcaagatcgggctgcccggctcaccagcccctcggctcaccattgacaatctcgtcgtgttccgtcgtacctggaggtttcccgctggctccatcgacatcatgcacggttcagccgccgagaaacacgctcggctgagggagtggcaggtcacgaatcaccttcctgaccacctcttcgtcaagttcccctccgaacccaagccgatctacttctccttcgagtcccccgccatggccacggtcttcacgcgatcactgcagcgcgacgcccgagagaatccagacagtctcgtgacgatgtccgaagcactgcccgagcctcaatcctcatggctgcacgacacccggagccaccactacgtccacgaattccggctgcaactgaccaaggagcgacatgacgaccacagttgagacacatcccgaaacacgtggcacaaccgcgacatccatctccaatctgatcggtcacacccctctcgtaagaatggaccatctgttcgacggcctccccttcgaggtgtacggcaagctcgagaagctcaatcctggcggaagcatcaaggatcgagcagcacaatccatgatcgaacgggcaattcgacggggtgagatcgtcccgggccgtacgaccgtcatcgagtccagttcgggaaatctcggcatcgccgtggcgatgctgtgccaggagcacggcctgaatttcatctgcgtaaccgatgccaaggccacgccaacgaacattcgactcatcgaagcgttcggggccactgttgaggtgatcgaagaacctcatcccgagagtggcgaattcctccccatgaggctcaagagggtaagagaactgctgtcagagattccagatgcatggtggccgaatcagtacgggaaccccgacaatccggcggctcacgagcggactgtccgcgagatcatcgaggcaatcccgcgggttgacacgattgtctgcgcgaccggctcgtgcggaacccttcgcggctgccacgaagcattgcgaaagctgtccccacgcacccgactcgtcgccgtggacgccaagggcagcgccatcttcgacgaggcaggagcaccccatccccgctgtgtcccgggacacggtgcgtcagtgcgaccgccgctgtggcgcgcggggctcgccgaccaactggttctggtctccgacgcggactgcgtcgtgggatgccaggaggccctgcgcaccgaggctcttctcctcggcggatcctcgggagcaattctgacggccattcaccgagtgtctcccacgattcccgctggttccaccgtggtgacgatcctccccgacggcggcgagcgctacatcgacaccatctacagccgctcgtgggtcgactcacacatccccgggctgccctctctcgccgactggggggctcccaaccccgccaattcgtatgacctgaacagaagtgcctcatgaagctctacaccagagagaccgtcgaaactgcgcttgtcgggcgtcatggccaggttctcagtgccgtacagagtgcatacatgctgcattcgacgggagagacatcgctgccattctcaaccttcctccgcccggccgggtatccgaacgatcggatcatcgcacttcccgcccacatcggaggcgacttcgacatagccggtatcaagtggatctcatccttcccggaaaacctcgaccggggccagcaacgagcttcctccgtactcatcctcaatagtctggagacgggatacccgaccgccctgctggagtccagtcagatttcagcaacgcgaacggcagcatcagccgccctggccagcgccaccctccatggctccgaagaccatgtcagcacgattggcatcatcggctgcgggacaatcaatcttgcaacgatcgactacctcttccacgtgcacccccagatcaacgaggtcctctccttcgatctgaggcgggagcgggcccatgagttctcgcacctcgtcaaggcttcgcacccagaggcccgggtccgtgtcgccaaggagcccgacgagattctggccgcaagcaacaccatcgcgatcgccacgaccgactcgagtcattggttggaccttccgccgtggcacgggccggggcaccaagtcgtcctgcacacgtcgctgcgagacctgtcagtgccctcgatcctggcagcggccaacgtcgttgacgatcctgatcacgtctgccgtgaagcgacgtccttggatctggcaactcagcagaccggcaaccgggacttcatcacggggagaatcggagacctccttcttggcgcgccgctgtcctcaagtcctgactcccgtgtcattttctcacccttcgggctcggcatcctcgacctcgcagtcgcctccgtcgtcattgctgccgcctcctcttcagcagtcgagatcaatgggttcgaccccgggaaacacgccacaagcatgattgaggtgaatcgatgaccaccacacagatcaacgacaacacggccgttctgcgcgacgtattccccgccggctccgtcgcattcgtgagcggtgcctcacgcggaattggcgctgcctgcgcgacagcccttgcggccgcgggatgcaacctcgccatcacttatcgaaggaaggagaacgaggcggcacaaatcgccgaatccattgaagccatcgggcgccagtgcatcacaatgcagatggacgtaaccgatgagaaccaagtgaccagagccttccgcatcattcgccagcattacggacgcctggacgccgcggtcttgaactcgggaatcaccagtgacgggcatcttgcaacaatgagccgctccaagtggagctcggtgatcgacacgaatctgaccggaaccttcctctgcacgcgcgaggcgaccaaggccatgtactcgtccggtggctcgatcgtcatggtcgcgtccaccagtggagttgcagggcgaccgggccaggccaactacgcagccagcaagggcggaatcgttgccatgatgaagacgctggccccggaggttgcggcaaagaacgtccgggtgaatgcggtggcacccggcttcattcagaccgacatggtggcggccgttccaaaagcggcactcgcccaggcaatccaacacatccccatgggccgtcttggcctggcacaggaggttgcgtcagccgttaccttcctggcctccccgctcgccgcctacatcacagggaagaccctcactatcgatggcggaatgatcaacggctgaccccaggacccggacacccccagtaccgagaaaggaacaacaatgaccgagatcacccacactgccaacagcatccgaacccgcgccgaggaacgttccaacaaagcttggcgcctgaaggaggagatcatctccaagctcggtctcgagaccaagccagaatatgtctcggacaaccaaccgctcttcggacgtggccttgagatggattcccttgacactctcgaagtcgtcgtcgccgtcaacaatgagttcggagtctcggtcaacgacgacgacgtacaggcgttcggctcgatcaatgccatggtcgatttcatcgaggtgaacgagaagtgagttctcttgcgctcgaggcgccacccaaggacgcccgtaagaaattcgcctacgacagcgatgccatcaagacgatgctcccacatcgttggccgatgctcatgattgatcgcgcctacgacgtcgtcccagggaaatcgggcaaaggcatcaagtcggtcagcgtcaatgagccgttcttcgccggtcactaccctgaccattccatcatgcccggcgtcatgatcgtcgagtcgatggctcaactcgtggccgtcatctacgtagccgaggccattcagaacaatcccggcatgacgtcgcacgacgcacgttcaagcgttggttatctcggcgcgatccatcagatgaagttccgacgcctcgtcactccgggcgaccaactcaccctccacgcccagctcggcgagaaagtgggggctctgcgcgaggtttccgtgagagcactcaatggccgggatgtcgtcgcccagggggaactcgtcgtcaccgagcggtgacacccagccacacacgagaaggaagtcccatgatcgttcgcccctacaggccacgtgatgcggaagcgatcgtacatctctacaacagccattccgactcccccaatccagtgtcgggagggattgttgaggaggagttccagagggagctcgaagaacgtggttcgacagtgttcctagtggccgaggaggccggatccattgtcggcacattcgggatgttccgcacgaatggccgacacaccatggccgatgatgaagtcttcgccgacatgttctatgtcaccccgtcacatcgactctcgacagttccgggacagctaatcactgaagccatcagcgagtgcttcatccagggcatcaacgtgatccgcctcaccgtgaaccccgcgaacatctccgcgctcaaggtttacagaaaagtcggttgtgcctgtctcggggccaccgatgcaggcgaggacgggaacattgagctgtacaacttcatccctctggttcttagggcaaccatcaccaaactcgaccacgattgtattcgagccctggcggacatgacttcgttcgcctgcatcaccgagggacgtccacttgatctgtcccacgacttcatcgtggacgctggacggaagatcgtctcccacagcatccagatcgggcgttcaaccatccacgccatggtcgacacgggctcgaggaccattgtggaggccaccctcgacaaccgcgactgggatgctcctcgccagatcgtcgcccccaccccctgtcagaaccggcccgaggaacagcgaggcaaccctgtccggctggtgcacaagaagcttgaggtcaccttcaacgaaggagtcattgagatcagtacgactggccactggggcccggtcctcgcaatgtcctggccctcctccgtctcgcaccgcgctcacgggtggcgacagggccccgccaagtcgtatcgatgcgagcttctcgagaattgcctcgtcctggatgacgaaggaggagtgaaatgcaccatcagcctcaatgattgccaagtcgcgatccggatggatggtgccccaaaaacggaattgagaatgtaccagtggtgcagcctgcgccagggctatctgacggctgacaccggcatcacgagcttcaaccgggcatccagtgggctcggagtcgccgtccgggactcgtccgagattgtcgccgcgggccttcccgtcatccctgacacaccgatcacatggagtgagggtgacatcacggttcagctcgatccctgcggccgcgcctccctgatccactcgaccctggtggaccgaagaatccacttggacgagtctggctcggcaagtctcaccatgaccgtgtttggtgactcccagccccatcgtgccgacaccgtcgagctgcctcccctcgcggcaggcaccgacaggatcgtcctcaagccggctgccggaggcgtgaccacatggcgcttgggcgccaccaaggtgctcaagtcaccgtggccacacgcccgcgcgctcgggcccaatccgatctggcgagccggcctgtgggtcagtcacgagccggatcgccacgaccgtcgccaaggaatggggtggggtcccgatcatcgcagttggaccctgtcggaagacaccatgaccagtactgacgggacactctcctggcgcttcagcggctcccccgacaccggctggacggtcgacgtcacgacgagcaacacgcacggggagaccgtcgtctggctcaccccggactgcccggcgggcgagaggatccgcacgtctgatcatgccgtgacgaccatgcttgacatctcgaagccatggcagcgctggaccacccgatgcgcaattcctctcagacacgggaagtggttcctcatcgagcctgatcatgacctcactgattcccccgaaatcctcatgcgctctgttcacggggtcctgctcgtcggctgtgtcggacgagcccactccggatccgcttcctggcgctttgccatcacgtcagaactccccacctccaacccaagaagaaacgactacacctcagccgcctgaacccaaccagttggaacacccactacagaagaaatggagcaccaccatgtccatcactgagcagtacaagacccttcgcacctcggtcggcctccacacgcctaccggtcccctggtccgtatcaccggtgatgatcgtctcgagtttctcgacaccttcctgtcccgcgcctcggacttcgtggaccccgacaccactcgggagtgcctcgctctcaccgaggacggccttccgctgacgatcttcctccacatcgagcgcgaggaggagtcatggctccttccccgcaccgccatcgatgcggcgaccctcgccacgtacctcggcaacctcgagaccgatggtgacctgtcaatcgagattgctccagagggttggggagctgtcgctgtcgaggggccgctgtcgtggcagatcgccgaaaaccttctcgacttcgacgtggctggcctcgttcttcacgccgtcacggacgtcgtcgttcccggggcccccgagggatcgaaggcatggctcgcccgggtcggaaccactggggagtacggctacctgctcgtctccaacgttcccgacctcgcccgcacttatctcctcagccgcgccacggagctgggcggtcaggcagtcgacgccgatgctctcgcacgagtccaggccgaggccgggatgccctattacgcgatgggcgtgtgccacctcgatgtcgccgggggtgacctcgcctggctcgtggactggcagcgcatcggcgagttccaaggatccgagaatctgcccacacccgtccgagaccagcgccgactggccgccatcgccctgcccaccggcaaccgcccggaagctggtcagaccgtcgctgccggggatgaggagattggagtggtggtgtacgtcaccccgtccgccaatcccgatgaggaactcgcgttcgcacttctggatgctcctttctggactcccacccttccgttgaccgtcggtgcccacgacgggaccacggtcaccctgccccgcgtcgtggcagcctccagcctcaacaagctggggtgacagcgatgacgatcactgctgagaacgccaccacccgcagcgacattgcccggagcattgcggtgaccggcgtgggactggtcacggcacagggtgaccataccgacgagtgctggaccgaacttgtcgatggggtttgcggaatcaccatgaacgtcacgttcgatgactctggcaccacgattccgtgtgctggcgtggctcccattccgaactctgattcgatcgaccgctgttacctgctcggcgtccatgccatgcgtgaagctctcgagatgagtggcatcgacctggactccgtgggtcgtgatcgcatcggactcgtggtgggctcaagcctcggcgcgatgcccaccttggaggcggctcatcgccgggccattgagaccggcgtgctcgatgccggattggcggcagactcccagctcccctgcgtcgccgaccacctcgccgctgagttcgacatccgtggaccccgcgtcgtgacatcgaatgcgtgtgccgctggtgccgtggcgatcggctacgccgcagaactcctctggtccgacgatgtggacctggtcgtctgtggcggtgtcgatccactggcccagatctctgccaatgggttcacgtgcctgggagctctcgacaatctcccatgcagcccgatggccggttcctccggtctgactctgggcgagggagccgggttcatggtcctcgagagaacagatgcggcggctgccagaggccaggaggtgatggccgaaatcgccggctacggcacaagttgtgatggttaccaccagactgccccggacccgggtggcaatggcgcccgcagctcaatggaggccgccctgcgctcagctcatctcaagccgtccgacgtcagctacgtcaatctccacggcaccggtactccgaccaacgacgccgtcgagccgaaggcactccggtcattgttcaagtccgatgaccttccccctgtcagttcggtgaagggcgccatcggtcacactctcggcgctgctggcgccatcgaggccgtgtgctcgatcaaggccatccacgagggggtcctgccgccaaccgtcaacaaccgcgggcaggcttcccgaactggtctcgacatcgtgccggagtgcgcacgcaaggccgctcccgacgtggtcatctccaactccttcgccttcgggggcaacaacgcatcagtggtcatcaccgcacctcgaggaggcgttcactgtaccgccccggcgcagcttcgcgaggtcggaatctcaggaatggcagctctggcgggaaaggccgccaactcggaggagcttctttcggccctgtcagaagattgtccaatctggatggccgatgagaagacctgggaaggggatgctgtccaaaccggccatgtggacatcaagcgcctgtcccgcacaatcaacccgtccaaggttcgtcggatggaccccttgggaatcatctccagcgcggtggtgactgatctgtatgcccgacacgggaagctgagccgcaaggatgccgaaagcacgggaatcatcttcgcaaccggctacggtcctgtgacggcggtgacgcagttcaatgacgggatcatccgccacggttccgagggtgccaacgccctggtgttcccgaacaccgtggtcaacgcagccgcaggccacctcgcgatgctgaatcgctaccgtggttacacggccaccttggcatgcggtggaaccagttcactcatggcgctgcttctcgctgctcgcgtcgttggccgcggcgctgcggatcgcatcatggtcgttatcgctgacgagtttcccagcattgccgtccaggccgtcgcaaagcttcctggctaccgacacagggttgatggttccggagccgtgctctcggaaggcgcggtatgcgtcctggtggaggccgtcgaagtcgccgaagcacgcggtaccgcccccatggcgctgctacgcggcttcggatcccgtggagagtccgtgggagtcggtcacaccgcatccgatggacgggcttgggccaaggccatggccgctgcactgggccaggccggcctgactgcctccgacgtgtcgaccgtcgtggcggcatcaagcggacatcctcgcgtcgaccgagccgagcaggcggccaggcggatcgtcggactgtccgcaaccgctacgaccttcccaaaggcgattgtcggagaaacacacggatcggctgccgggatcgggctgttcggtgccctgtgcggttcgaggtcagccgcgcaccagaacatccttgtcaacgccttttcccacggcggtggttatgcctcgatggtggtggagtcactgtgaccacgacgcttctgccacgggttgcccagccgggaccgggcgtcagccatgtcgacaccgaccgtcccatcgagtgcatcatcacccaccacccccacatgccgcgtgatcgcggaggccacgccacctccgtgtcaggcaggtacttgctgcgccaagccgcagaactcatgctcggcacggatcctgcgcattgccccgtcgtcgacccttcgcggcgctggtactggcccggaatcaatcttcacggttctgtctcccatgtcccgggctggagcctgacgacgctgagcaccggcggccacatcggggcagacatccaggacttccgggagcgtcccggcgcaatggcattcatcggtgacctggtcaagctgtcgcgatcggcgtcactccgagaattcgcggagtgcgaggccgtcgtcaaggtgtccgaattgactaaggagacgttcgggcacgtgcgactgcccgaatggacacccggatggcgccacgttttcgaggactactgggtctggagtctcgagatgcacgggatgggagtcatcgcactcgcatccgatctcccccgagccattcgctggtggcggtgcgacgccgatgcccgtggccgtctccaggctctccgacccataagcagtcttggaccaggaaggccgtcatgagccggtactcacgtcgaatctcaggcatcgaacgcggctatctcaacgccgcaacccggggcccgcaccccaccatccacacgatgatcgacttcgagggccgcgtccccgccgactgttggcggcacgcatccacgattgcgtcggccgccaaccctggcatgacagtggtccggaggtcgggccgatggacatccgatccagcgggctgtccggttgtgttccacgactggaccgcggaccccaacgacgttgccgacttccacgctgacatggatctcgtgacgggaccatcgtccacgctccacgttttcgagggggcggaacgcacccgaatcaccttggcagcaagccatgccgtgaccgatgggcggggcatcgaacgatttctcgtcgacctgcttgcagcgttggacgagcgtgaacccattggaagccccgacaccctgaccgatgtcgatatcaaacgatccttggagaacagcatcaagccccgacgccacctggccgctgtgcccgccgatgtcctttctccactgggggggaggaagaaccaacgtatatgggcctccaggacgtggcacagtgccccgggagccatgagcggaagaatcgctgccgctgtggccgagatgatcgaccacgccgcaatgatcatcatcccggttgacatccggcggcacgtcccagaggtccgatccacagcaaacctaagtgcccaactgccagtgatcatcaccccgaaccagcgctggcaaagcatccatgggcatctgctcacggaccttgctcgccatcgagaccttgcgatcatcagtgaggatttccgccacaacaatccgttcgcatcgaccttggaggaaagccaggccatcggcctcgatggtgtctatccctgtgccgcaatcatctccgaccacgggaagctcgacctttcaaggttccagaccttggaactcaccccggtctcgatgcgaagcctcccgatgctcgttccctactccgcaatgttcatcagcagttgcaccgtcggcgagaccaccactgtcaccatcgctcatcgcgctgatgacgatcccgattccataaacaccttcttccaccacatcgaatcccagatgtccatctgagccacgtcgtccctggagagcaaacatgaccacccaagatgtcatcaccccgccgcgccccgtcacctcccatgccacggcgaccaggtccgaggctccaccgcgaagcgtcatcagagccatggccatctcgatggtcgcgaccctcatggtcatgctcgacacgaccgtcgtgaacgtgtccttgagcgcgaccaccgcccgcttcgggagcatgggcagcgtgcagtgggtcctcacaagttacctacttgcactgtgcgcgacgatgacggcctccgcctgggtcatcgaccgccttggtccacggctcaccttcatcgcctcaatgaccatgttcctcatcggctcggtgatgtgtgcactgagcgattcagtgtggcaactcgtcactggcaggaccatctccggtgccggagctgggatccttgttccgacagcatccgtcctgcttatccgtggcatcccacgcgaacaacttggcagggtgcaggcactgaatgggagtgtccagttgatcgctcccctgatcggcccgactgtgggcggtctcctcgttgacaggtgcgggggctggccggccatctactgggcgaacgtccccgtagctcttgttcttctgattgaggccgtccgcgtcgatccggacgaaccacacaccgctaagcgccgcctcgatgctctcggcctggtctgtggcagcaccgcgatcgtgctgacagtgcttggtgtctcactcttcggcaggacgtcgcgaaacaccaccttcctgcttacgatcggcgcgcttgcagtcctcgcatgggcgttcttcatcacccacatccgaagggctaccaaccctctgcttgacgtttccctgtatcagaaccctgtctattcatggtccagcttcaacgtagcggtgcttggtttcggtctctacgcccccatggtcgtcatgcccctctatctcgaggcgacgcgccacctcactgccgtccacactggtctggtgatgtcagtggccggcgtcggcgtcattatggccggaatcctgtgcacgaagatcatgggccggatcggtggaggcctcacgatgacagttggcataactctgagcatcatcgccactctgcccctggtccggctgacgaaccacacctcctacatactcctggcagtctgcttggccttgcgtggagcaggaatcagcctgacaatcgtcccagccatgacacgggccttcgagtccatcaagaggacggccatggcggacgcctctgcacagctcaacctgttgcagcgaatcggcgggacaattgcgacagcagtcatcatcgcagttatccaccacgaggccatgctcacccgcggactctcccccacagtgttctcgcacgccaacgtgtggatcctcaccgcgaccgccgtcacccttctgccggccttcgcgcttgcgaaggccgaaagacaacagcaggatctctgagcaccgaggagtactccctcgtagaccctcctctgatctaattgggttcgttccaagtgtgtatctcactccggggagccccgattgctgaaccacatcccgttcaccctggcgagtccctcgtggtacgacgtcccctgggcgcccggatctccgtatctcacaggagatatctcggtcctgccagcggactcgccaaggtggacgacgaccatccggggtccttggcaaatccacatgccacctcgtccgacccttccagaggtggggtggaaagtgcatgtgtctgccaagccatcggaattggaatcggttgcctcagtcgtagcactgtggtgcgtacgccacagcgtccccttcaaagtacttcgcacccgaggtctcgttcacgcgagtcaagtcaagtatgcggaccgaagtcagagcggcaaggtctgcacctgctaccccgacggcgagagccttgagcacttctgctccggtcttgccgagctgcttcagaacgtcgattcacctccggtgtccggcgagctgcgagtcggatcctcccctctgtggttgcgtcacgggagtttccgagaggcatgggcggtgtcatccacaggagtaccgttcccggtctacccgggaacaacacatcctgatcgtcgaggccccgcgcccgcagaatccgatcacgacacgccgtggatccggaggctccgtcggacgaatcgccccagcacggttcttcccatcgacgatgtcagactcctccaccaatcaaatgctggcggcgtgtatcaggcaacatggagagacggcacatcggtagtcgtcaaggaggcccggcacctgtccggacttgatgcggcgggtgtcgacgcccgagtgcggctgcgtcacgagtacgaggccctgagaagactggacccctatcgggccgctccccatcccattgatctcattgagaccgaggacggctcgttcctgatcatggaattccttgacggaatgacagtccaccaggagatgtcgaggttccatcctctgattggtaggcgacctcatcggctatcgatgaccgatttttcacgctggtgccgagaggtcgaagatcgcttgaggaatgtcacgagggtcatggccgggtgcggaatcgttcacggggatcttcatcccgcgaatctgatacatgtcggccatgaggttttggttactgactttgaatcctgctcaatcgacggggtcgccgtctcgtcagggatcgccgctccctggttccagtcggacgacacgattcccgatccggcgacgactgacgatctccacactcttctcgtggatccgacttgcggccccgcgcttgtcctccatccaaatcttcgcgcgctcatcagccaggccgcagtcgaggacatgatgggaaatccgactggtttaccacatgcctggaacctcgaggacgtgacaagcgaactcgccaaggggatccgggcatcagccactcccgcacgagccgaccgcctctttccctcagacccctacctgttcgggcatccaggttcagaattcggcctgatgcatggcgccgccggaatcatggctgctcttgccgtgactgggtacggtgttgacgcgaatcacgtgacctggatgaaggaccgcttggccacccgcccgaccctgctgccggggttggccaacggaatcgagggaattgccctgggtctctccctgtgcggtcagaacgacatggctgcatccctgctccaccagtccggaattctcacgatcacaacgaacggatcgactgacctcaccctcggtactggtatggcgggccgagcgtgcgcgctgcagtccctctcacaacgactgtcatcgaaatctctcgcccacgctgcatgtaccctctgggaacaactcgccgtggctgtgcggaacactgatgtggccttgccgaacggcctgttctccggttgggaggggatcgggctctccctgcttgcctctcccctgccggatcgtcatgatctcgcccgccactcactccgactggccctggccacgacaacgattgttgacggtgcgctcttctcaggcgagggacagatccgatggccatatctggggcgtggtcccgcggcatgtggcccgctcgccgccaggcttgatgatgaccagacggccaaggccgtggcacagacctgtcgttgtcccctgactgagtcatccggtctccacaatggccgcgcaggtctcctactcgtcctccgccagctcgtgggagaccaagacgacgccgttcgccgccacctcatgagactgtcgtggtcgatggaccgtcgcgaggaaggcacattgctgctgggtgatcatggcctgcgtttctcatccgatctcgcgacggggtcagccggcgccctcctcgccctgagcagggacccatggcggaacatgacacgaatgctcggaatatgcgatgacacctgtcatggcccactagtgacagtttgatctagcgccgatagttcacaactgaaagactccaaacatcgaggaaaacatgctgagccaaaacgccttggcaggcgtggctcgtttcaccacgatgaacaccaggagacagaatgtccgttgaggccatgcaatccatcgagatggacgaggaaaacagcgccagccagacagtttgcgcttgttacagcttcttctcgtggtcaggatgctgcgtagtctcccaagcggtggaagcatcttgatcgtgtgagacgccgtcgactaccctgtcccccgtggtacgcacacgccccgtcctggacagtcccggaagaccgctcatcgcctccggagtcgtcctggcggtcctgctcatcatcgcggtgatgacgatggtgcttcagcgcgaccccactctcacccccggacgccgcattctcggtatcgtcctgtccacggtccaggccgtcggattcatgtggctgcagacccgcatggttcgtcacggcaagggttcgcgcaacatgcgtgcgacccttggaagggtcggtttctgggccacgtggggactcgtcgcagtgggagtcgtcaatctgtggctgaccaactcgtggaccctcttcggggcctccgtcgccacgcccctccttctcctgccaggggtgtggagtgtggtggccaccctcgtgaccctgatcgtcggtttctccgacctcgtggtcacccacacctcgccactgacctcagccacggtcgtgctggtgaccatcgcggtgtcggtgaacctctacgcattcacgaagctgtcgacggcactcgttgaactccgctcctcccaggaggagatcgcccggctgcgcgtggacgccgagcgtcaccggatatcgcgggacctccacgacatcatcggtcgcaccctggtcgccacgtcgatgcgccagcaggcggccctccacctcgtcgaccgcgacccgcaacgggccaaggaacagctcgacgccgcccatgacgcaatcaccgaggggcagcaccagttgcgttccatcatccaggccgagatgagcaccagcctccccgacgagatcagcgacgccacattcctgtgcgaccgactccacatcgacttccgcatggatgaccgcggcagaccgcacaaacccttcgactcggcggcggcggcggccctgcgcgagggaatcacgaacatgctcaagcacagcgcggcgggctactgccacgtcgccatctccccggacctcctgaccgtcaccaacgacggttgtccgcaatcacctcgcccctccaccacaccgggcaccggaatcgaccatctccggtcccagatcgaggcgctcggtgggtcggtgacgacgtcgcggccctcgcggggcaccttccggctccgctgctccttcccgacccggggggcgtccacgaccacacccgcgaccgaaggaggacgatgacgacgagaatcctcctcgccgaggacatcaaactggtggcagaggccttcgaggcactgctctcggtggaaccggagttcgaggtcgtcgcacgggtggcacgcggcgacgacctggtcacatccgccacccgcctgttccccgacgtgatcctggccgacatcgacatgcccgggatgaccggcatcgaggccacccgaatgcttcgcgacaagggataccgcggcagaatcatcctgctcaccgccctgccgggaagcgggcacctgcacgccgcgatggctgccggagccgacgggtacctgctcaagtcgatcaccgcgccctccctcatcaacgccatccgggcggtgtgcaacggccagtcggccatcgacccgaacgtcgccgcggtcgccatgcgcaagggaccctcgcccctcaacgaccgggaaaccgagattctgcgcctagtcgccgacggttcctccaccgcgcagatcgcctcgcggctgtacctcagcaagggcaccgtcaggaactacctgtcgacggcgatgtcgaagctcgacgccgactcacgcacagcggcggtcacgcgggcacgcgaggagggctggctgtagcaggcgacccgctcagcccaccgcccctcagcccaccgcccctcagcccgccgactcctgacgcacggcctcctcgaccgcccagctgagcagggacccggccctgaccatcgacgtctccgggtccggctcgaggtcggacaacgcgatgatccggtcgaacgcggaccgtttctcctcgggcaggtcacagcgtccgcacaccgcccagacgggcaccccggcgtcccgggcgatcttgcggatggtgtcgagaagcttgccgagcagggtctgctggtccagccgcccctcccccgtgacgacgagactggaggcggagatccgcgacaccgcgcgggaccatcccaggacgaccgccgcgcccgggcggtacctggtccccaggcacatcagcgcccagccgacccggctgggcggctgcgaaccccctggccaccgcccggcaggcctttcccgaactcagcgaccccttgaaggagtcgacggcaacgatgaccggcgcattcggatcaggacgcatgggatcagcatgtcacgtcgatacggagcagtcgcgccgcctacccctagactcgggggcatggtcaaccgagtctacctgtccctgagcgttctcgccctcgtgctgtgggtggtcgcctaccgtcacatgccgggctgggccgcgggcatcaccctggtgggcatcgtcgtgctgtcgctgtggtgcgagtggtcgcgggtgcgcaccctggccaggatcggcaagtcccgccagcagggcccccgctcctcccgaggacgcaacctgtcgtgagcaatacgattcccgcagccctccaccccggccctgacgaggcc

1. A pharmaceutical composition comprising:
a) a therapeutically effective amount of a health-associated Propionibacterium acnes microbe, wherein the health-associated Propionibacterium acnes microbe is characterized by at least one of the following:
i) comprises at least one gene encoding at least one of a deoxyribose operon repressor and a type II lipase, and less than about 10% pIMPLE plasmid;
ii) comprises at least one gene encoding an ATP binding cassette transporter; or
iii) lacks at least one gene encoding a DNA binding response regulator or a phosphoglycerate kinase, and
b) a pharmaceutically acceptable excipient or biological stabilizer.

2. The pharmaceutical probiotic composition of claim 1, wherein the health-associated Propionibacterium acnes microbe has been engineered or selected to comprise a deoxyribose operon repressor and a type II lipase.

3. The pharmaceutical probiotic composition of claim 1, wherein a Cas5 protein is absent from the health-associated Propionibacterium acnes microbe.

4. The pharmaceutical probiotic composition of claim 1, wherein the health-associated Propionibacterium acnes microbe expresses an ATP binding cassette transporter.

5. The pharmaceutical probiotic composition of claim 1, wherein the health-associated Propionibacterium acnes microbe does not express a DNA binding response regulator or a phosphoglycerate kinase.

6. The pharmaceutical probiotic composition of claim 1, wherein the health-associated Propionibacterium acnes microbe comprises an RT1 or RT2 ribotype.

7. The pharmaceutical probiotic composition of claim 1, wherein the health-associated Propionibacterium acnes microbe does not comprise an RT6 ribotype.

8. The pharmaceutical probiotic composition of claim 1, wherein the health-associated Propionibacterium acnes microbe comprises less than about 1% pIMPLE plasmid.

9. The pharmaceutical probiotic composition of claim 1, wherein the pharmaceutically acceptable excipient or biological stabilizer increases the viability of the health-associated Propionibacterium acnes microbe at a temperature from about −20° C. to about 30° C.

10. The pharmaceutical composition of claim 1, wherein the health-associated Propionibacterium acnes microbe comprises a mixture of two or more different ribotypes of Propionibacterium acnes.

11. The pharmaceutical probiotic composition of claim 1, wherein the health-associated Propionibacterium acnes microbe comprises an HP3A11 strain, an HP3B4 strain, an HP4G1 strain, or an HP5G4 strain.

12. The pharmaceutical probiotic composition of claim 1, comprising an additional strain of bacteria, wherein the additional strain comprises Propionibacterium avidum, Propionibacterium acnes sub sp. defendens, or Propionibacterium granulosum.

13. A method of treating a skin disorder or condition comprising applying a therapeutically effective amount of a pharmaceutical probiotic composition comprising:
a) a therapeutically effective amount of a health-associated Propionibacterium acnes microbe, wherein the health-associated Propionibacterium acnes microbe is characterized by at least one of the following:
i) comprises at least one gene encoding at least one of a deoxyribose operon repressor and a type II lipase, and less than about 10% pIMPLE plasmid;
ii) comprises at least one gene encoding an ATP binding cassette transporter; or
iii) lacks at least one gene encoding a DNA binding response regulator or a phosphoglycerate kinase, and
b) a pharmaceutically acceptable excipient or biological stabilizer.

14. The method of claim 13, wherein the skin disorder or condition comprises acne, eczema, seborrheic dermatitis, psoriasis, or rosacea, or a combination thereof.

15. The method of claim 13, wherein the health-associated Propionibacterium acnes microbe has been engineered or selected to at least one gene encoding the deoxyribose operon repressor and the type II lipase.

16. The method of claim 13, wherein a Cas5 protein is absent from the health-associated Propionibacterium acnes microbe.

17. The method of claim 13, wherein the health-associated Propionibacterium acnes microbe comprises an RT1 or RT2 ribotype.

18. The method of claim 13, wherein the health-associated Propionibacterium acnes microbe does not comprise an RT6 ribotype.

19. The method of claim 13, wherein the pharmaceutically acceptable excipient or biological stabilizer increases the viability of the health-associated Propionibacterium acnes microbe at a temperature from about −20° C. to about 30° C.

20.-22. (canceled)

23. A pharmaceutical probiotic composition comprising:
a) a first therapeutically effective amount of a first health-associated Propionibacterium acnes microbe, wherein the first health-associated Propionibacterium acnes microbe is characterized by at least one of the following:
i) comprises at least one gene encoding at least one of a deoxyribose operon repressor and a type II lipase, and less than about 10% pIMPLE plasmid;
ii) comprises at least one gene encoding an ATP binding cassette transporter; or
iii) lacks at least one gene encoding a DNA binding response regulator or a phosphoglycerate kinase;
b) a second therapeutically effective amount of a second health-associated microbe; and
c) a pharmaceutically acceptable excipient or biological stabilizer.

24.-30. (canceled)
